(19) United States
(12) Patent Application Publication
(10) Pub. No.: US 2026/0207704 A1
(43) Pub. Date: Jul. 23, 2026

(54) STAPLED PEPTIDES AND METHODS THEREOF

(71) Applicant: Parabilis Medicines, Inc., Cambridge, MA (US)

(72) Inventors: Brian Halbert White, Malden, MA (US); Jonathan Barry Hurov, Bedford, MA (US); Yaguang Si, Arlington, MA (US); Daniel Seungduk La, Chestnut Hill, MA (US); Lorenzo Josue Alfaro-Lopez, Belmont, MA (US); Paula Cristina Ortet, Malden, MA (US); Sarah Isabelle Cappucci, Tyngsboro, MA (US); Zhi Li, Braintree, MA (US); John Hanney McGee, Somerville, MA (US); Martin Robert Tremblay, Melrose, MA (US); Gregory L. Verdine, Boston, MA (US); Kevin Ling, Somerville, MA (US); Peicheng Du, Lexington, MA (US)

(21) Appl. No.: 19/139,189

(22) PCT Filed: Dec. 15, 2023
(86) PCT No.: PCT/US2023/084461

§ 371 Date: Jun. 13, 2025

Related U.S. Application Data
(60) Provisional application No. 63/432,998, filed on Dec. 15, 2022.
(60) Provisional application No. 63/459,636, filed on Apr. 15, 2023.

(51) Int. Cl. A61K 38/12; A61K 45/06; A61P 35/00

(52) U.S. Cl. CPC A61K 38/12; A61K 45/06; A61P 35/00

(57) ABSTRACT

Among other things, the present disclosure provides various useful agents. In some embodiments, provided agents can bind to beta-catenin. In some embodiments, the present disclosure provides technologies for modulating beta-catenin functions. In some embodiments, the present disclosure provides technologies for preventing and/or treating conditions, disorders or diseases associated with beta-catenin. In some embodiments, the present disclosure provides designed amino acids and agents which can provide improved properties and/or activities.

### CROSS-REFERENCE TO RELATED APPLICATIONS

[0001] This application claims priority to U.S. Provisional Application No. 63/432,998, filed Dec. 15, 2022, and U.S. Provisional Application No. 63/459,636, filed Apr. 15, 2023, the entirety of each of which is incorporated herein by reference.

### BACKGROUND

[0002] Stapled peptides are useful for various applications. For example, as biologically active agents, they can be utilized to modulate various biological functions.

### SUMMARY

[0003] Among other things, the present disclosure provides powerful technologies (e.g., agents (e.g., those that are or comprise peptides, in many embodiments, stapled peptides), compositions, methods, etc.) for modulating various biological functions. In some embodiments, provided technologies are useful for treating hepatocellular cancer, e.g., those comprising a beta-catenin mutation such as D32H, D32V, S37C, S45F, etc.

[0004] In some embodiments, the present disclosure provides agents, e.g., stapled peptides that comprise multiple staples. In some embodiments, the present disclosure provides agents, e.g., stapled peptides that comprise three or more staples. In some embodiments, the present disclosure provides agents, e.g., stapled peptides that comprise three or more staples within 10-20 amino acid residues, e.g., 10-15, 11-15, 11-14, 11, 12, 13, 14, 15, 16, 17, 18, 19, or 20 consecutive amino acid residues. In some embodiments, the present disclosure provides agents, e.g., stapled peptides that comprise three or more staples within 11 consecutive amino acid residues. In some embodiments, the present disclosure provides agents, e.g., stapled peptides that comprise three or more staples within 14 consecutive amino acid residues. In some embodiments, within such numbers of amino acid residues there are three staples. In some embodiments, within such numbers of consecutive amino acid residues there are four staples. Without the intention to be limited by theory, in some embodiments, provided agents, e.g., stapled peptides have increased rigidity than reference peptides (e.g., unstapled peptides, or stapled peptides having fewer staples (in some embodiments, fewer staples within certain numbers of amino acid residues as described herein), etc.). In some embodiments, provided agents, e.g., stapled peptides demonstrate various desired properties and/or activities. In some embodiments, provided agents, e.g., stapled peptides provide improved desired properties and/or activities than reference peptides (e.g., unstapled peptides, or stapled peptides having fewer staples (in some embodiments, fewer staples within certain numbers of amino acid residues as described herein), etc.).

[0005] In some embodiments, provided technologies comprise designed structural features, e.g., novel amino acid residues, that can provide significantly improved properties and/or activities compared to comparable reference technologies that do not contain such designed structural features. In some embodiments, the present disclosure provides designed amino acids as described herein, whose incorporation into peptide agents, including stapled peptides, can provide significantly improved properties and/or activities such as improved lipophilicity and/or delivery into cells compared to reference amino acids (e.g., Asp). In some embodiments, the present disclosure provides technologies including peptides comprising such designed amino acid residues. In some embodiments, the present disclosure provides stapled peptides comprise such designed amino acid residues.

[0006] In some embodiments, the present disclosure provides technologies for modulating one or more functions of beta-catenin. Particularly, in some embodiments, the present disclosure provides various agents, e.g., peptides, in many instances stapled peptides, that can bind to beta-catenin and modulate its functions. As demonstrated herein, in some embodiments, the present disclosure binds agents that can interact with beta-catenin at a unique set of residues. In some embodiments, a binding site comprises one or more or all of the set of residues. In some embodiments, provided agents interact with one or more of a set of residues that are or correspond to the following residues of SEQ ID NO: 1: A305, Y306, G307, N308, Q309, K312, R342, K345, V346, V349, Q375, R376, Q379, N380, L382, W383, R386, N387, D413, N415, V416, T418, and C419. In some embodiments, provided agents interact with one or more of amino acid residue that are or correspond to A305, Y306, G307, N308, Q309, K312, R342, K345, V346, V349, Q375, Q379, N380, L382, W383, R386, N387, D413, N415, V416, T418, and C419 of SEQ ID NO: 1. In some embodiments, provided agents interact with one or more of amino acid residues that are or correspond to A305, Y306, G307, N308, Q309, K312, K345, V346, V349, Q379, N380, L382, W383, R386, N387, D413, N415, V416, T418, and C419 of SEQ ID NO: 1. In some embodiments, provided agents interact with one or more of amino acid residues that are or correspond to G307, K312, K345, W383, N387, D413, and N415 of SEQ ID NO: 1. In some embodiments, provided agents interact with one or more of amino acid residues that are or correspond to K312, K345, R386 and W383 of SEQ ID NO: 1. In some embodiments, provided agents interact with one or more of a set of residues that are or correspond to the following residues of SEQ ID NO: 1: G307, K312, K345, Q379, L382, W383, N387, N415, and V416. In some embodiments, provided agents interact with all of a set of residues that are or correspond to the following residues of SEQ ID NO: 1: Y306, G307, K312, K345, Q379, L382, W383, N387, N415, and V416. In some embodiments, provided agents interact with all of a set of residues that are or correspond to the following residues of SEQ ID NO: 1: G307, K312, K345, Q379, L382, W383, N387, N415, and V416. In some embodiments, provided agents interact with all of a set of residues that are or correspond to the following residues of SEQ ID NO: 1: Y306, G307, K312, K345, Q379, L382, W383, N387, N415, and V416. In some embodiments, provided agents interact with one or more of amino acid residues that are or correspond to K312, K345 and W383 of SEQ ID NO: 1. In some embodiments, provided agents interact with the amino acid residues that are or correspond to K312, K345 and W383 of SEQ ID NO: 1.

[0007] As demonstrated herein, provided technologies can modulate one or more biological processes associated with beta-catenin. In some embodiments, provided agents, e.g., stapled peptides, compete with a ligand (e.g., with a member of the T cell factor/lymphoid enhancer factor (TCF/LEF) family of transcription factors) for binding to beta-catenin. In some embodiments, provided agents compete with a ligand for binding to beta-catenin at a particular binding site (e.g., with a member of the T cell factor/lymphoid enhancer factor (TCF/LEF) family of transcription factors at the TCF site on beta-catenin). In some embodiments, provided technologies compete with TCF for interactions with beta-catenin. In some embodiments, binding of provided agents to a beta-catenin site decreases, suppresses and/or blocks binding to beta-catenin by another binding partner (e.g., a kinase). In some embodiments, binding of provided agents blocks binding of beta-catenin by a TCF/LEF family member. In some embodiments, the present disclosure provides agents that can bind to a site of beta-catenin selectively over one of more other binding sites by other ligands (e.g., peptides, proteins, etc.; in some embodiments, a ligand is Axin; in some embodiments, a ligand is Bcl9). In some embodiments, provided technologies modulate one or more beta-catenin functions associated with its interactions with TCF. In some embodiments, provided technologies selectively modulate beta-catenin functions, e.g., functions associated with TCF interactions. In some embodiments, provided technologies selectively modulate beta-catenin functions and do not significantly impact functions that are not associated with beta-catenin (e.g., various functions and/or processes in the Wnt pathway that are not associated with beta-catenin). In some embodiments, provided technologies are useful for inhibiting beta-catenin functions. In some embodiments, provided technologies are usefully for promoting and/or enhancing immune activities, e.g., anti-tumor adaptive immunity.

[0008] In some embodiments, provided technologies are useful for preventing or treating various conditions, disorders or diseases including cancer. In some embodiments, the present disclosure provides methods for treating or preventing a condition, disorder or disease associated with beta-catenin, comprising administering to a subject suffered therefrom or susceptible thereto an effective amount of a provided agent or a pharmaceutically acceptable salt thereof. In some embodiments, a condition, disorder or disease is associated with beta-catenin's interactions with TCF. In some embodiments, a condition, disorder or disease is hepatocellular cancer.

[0009] In some embodiments, an agent, e.g., a staple peptide, is administered as a pharmaceutical composition. In some embodiments, the present disclosure provides pharmaceutical compositions which comprise or deliver a provided agent or a pharmaceutically acceptable salt thereof. In some embodiments, a pharmaceutical composition further comprises a lipid. As demonstrated herein, in some embodiments, a suitable lipid can promote delivery/activities. In some embodiments, an agent is or comprises a peptide. In some embodiments, an agent is or comprises a stapled peptides. In some embodiments, provided agents that can bind beta-catenin comprise one or more designed amino acid residues. In some embodiments, the present disclosure provides a pharmaceutical composition comprising an effective amount of an agent, e.g., a stapled peptide, wherein when the composition is administered to a model as described herein, a result as described herein (e.g., reduction of tumor size, inhibition of tumor growth, etc.) is observed. In some embodiments, provided technologies, e.g., agents, compositions, etc., are capable of reducing hepatocellular tumor growth, or shrinking hepatocellular tumor size, e.g., in a subject, a PDX model, etc. In some embodiments, they are capable of reducing hepatocellular cancer cell proliferation. In some embodiments, a hepatocellular tumor or hepatocellular cancer cell comprises a mutation, e.g., a mutation in beta-catenin such as D32H, D32V, S37C, S45F, etc.

[0010] In some embodiments, the present disclosure provides agents that bind to a polypeptide comprising or consisting of SEQ ID NO: 1 (Uniprot ID P35222), or residues 250-450 of SEQ ID NO: 1, or residues 305-419 of SEQ ID NO: 1:

Uniprot No. P35222
(SEQ ID NO: 1)
MATQADLMELDMAMEPDRKAAVSHWQQQSYLDSGIHSGATTTAPS
LSGKGNPEEEDVDTSQVLYEWEQGFSQSFTQEQVADIDGQYAMTR
AQRVRAAMFPETLDEGMQIPSTQFDAAHPTNVQRLAEPSQMLKHA
VVNLINYQDDAELATRAIPELTKLLNDEDQVVVNKAAVMVHQLSK
KEASRHAIMRSPQMVSAIVRTMQNTNDVETARCTAGTLHNLSHHR
EGLLAIFKSGGIPALVKMLGSPVDSVLFYAITTLHNLLLHQEGAK
MAVRLAGGLQKMVALLNKTNVKFLAITTDCLQILAYGNQESKLII
LASGGPQALVNIMRTYTYEKLLWTTSRVLKVLSVCSSNKPAIVEA
GGMQALGLHLTDPSQRLVQNCLWTLRNLSDAATKQEGMEGLLGTL
VQLLGSDDINVVTCAAGILSNLTCNNYKNKMMVCQVGGIEALVRT
VLRAGDREDITEPAICALRHLTSRHQEAEMAQNAVRLHYGLPVVV
KLLHPPSHWPLIKATVGLIRNLALCPANHAPLREQGAIPRLVQLL
VRAHQDTQRRTSMGGTQQQFVEGVRMEEIVEGCTGALHILARDVH
NRIVIRGLNTIPLFVQLLYSPIENIQRVAAGVLCELAQDKEAAEA
IEAEGATAPLTELLHSRNEGVATYAAAVLFRMSEDKPQDYKKRLS
VELTSSLFRTEPMAWNETADLGLDIGAQGEPLGYRQDDPSYRSFH
SGGYGQDALGMDPMMEHEMGGHHPGADYPVDGLPDLGHAQDLMDG
LPPGDSNQLAWFDTDL.

[0011] In some embodiments, provided agents specifically interact with one or more residues which are or correspond to residues 305-419 of SEQ ID NO: 1. In some embodiments, provided agents bind to a motif (e.g., a portion of a polypeptide, a domain of a polypeptide, etc.) that comprise one or more residues corresponding to Ala305, Tyr306, Gly307, Asn 308, Gln309, Lys312, Arg342, Lys345, Val346, Val349, Gln375, Arg376, Gln379, Asn380, Leu382, Trp383, Arg386, Asn387, Asp413, Asn415, Val416, Thr418, and Cys419 of SEQ ID NO: 1. In some embodiments, provided agents bind to a motif (e.g., a portion of a polypeptide, a domain of a polypeptide, etc.) that comprise one or more residues corresponding to Ala305, Tyr306, Gly307, Asn 308, Gln309, Lys312, Lys345, Val346, Val349, Gln375, Arg376, Gln379, Asn380, Lcu382, Trp383, Arg386, Asn387, Asp413, Asn415, Val416, Thr418, and Cys419 of SEQ ID NO: 1. In some embodiments, an agent binds to a motif comprising one or more of the following residues within SEQ ID NO: 1: Ala305, Tyr306, Gly307, Asn 308, Gln309, Lys312, Arg342, Lys345, Val346, Val349, Gln375, Arg376, Gln379, Asn380, Leu382, Trp383, Arg386, Asn387, Asp413, Asn415, Val416, Thr418, and Cys419. In some embodiments, an agent binds to a motif comprising one or more of the following residues within SEQ ID NO: 1: Ala305, Tyr306, Gly307, Asn 308, Gln309, Lys312, Lys345, Val346, Val349, Gln375, Arg376, Gln379, Asn380, Leu382, Trp383, Arg386, Asn387, Asp413, Asn415, Val416, Thr418, and Cys419. In some embodiments, an agent binds to a motif comprising one or more of the following residues within SEQ ID NO: 1: Ala305, Tyr306, Gly307, Asn 308, Gln309, Lys312, Arg342, Lys345, Val346, Val349, Gln 375, Gln379, Asn380, Leu382, Trp383, Arg386, Asn387, Asp413, Asn415, Val416, Thr418, and Cys419. In some embodiments, an agent binds to a motif comprising one or more of the following residues within SEQ ID NO: 1: Ala305, Tyr306, Gly307, Asn 308, Gln309, Lys312, Lys345, Val346, Val349, Gln379, Asn380, Leu382, Trp383, Arg386, Asn387, Asp413, Asn415, Val416, Thr418, and Cys419. In some embodiments, provided technologies bind to a motif comprising at least 2, 3, 4, 5, or 6 of G307, K312, K345, W383, N387, and N415. In some embodiments, provided technologies bind to a motif comprising at least 2, 3, 4, 5, 6, or 7 of G307, K312, K345, W383, N387, D413, and N415. In some embodiments, provided agents specifically bind to such motifs. In some embodiments, a motif may be referred to as a binding site. In some embodiments, provided technologies selectively bind to such a binding site over an Axin binding site. In some embodiments, provided technologies selectively bind to such a binding site over a Bc19 binding site. In some embodiments, provided technologies selectively bind to such a binding site over an ICAT binding site. In some embodiments, provided technology binds to such a binding site in a reverse N to C direction compared to TCF. In some embodiments, provided technologies do not bind to Axin binding site of beta-catenin. In some embodiments, provided technologies do not bind to Bcl9 binding site of beta-catenin. In some embodiments, provided technologies do not bind to ICAT binding site of beta-catenin. Various technologies, e.g., crystallography, NMR, biochemical assays, etc., may be utilized to assess interactions with beta-catenin in accordance with the present disclosure.

[0012] In some embodiments, the provided technology provides an agent, e.g., a stapled peptide, that comprises multiple, e.g., two, three, or more, staples within 10-20, 10-15, 10, 11, 12, 13, 14, 15, 16, 17, 18, 19, or 20 consecutive amino acids residues. In some embodiments, there are three or more staples within 10 consecutive amino acid residues. In some embodiments, there are three or more staples within 11 consecutive amino acid residues. In some embodiments, there are three or more staples within 12 consecutive amino acid residues. In some embodiments, there are three or more staples within 13 consecutive amino acid residues. In some embodiments, there are three or more staples within 14 consecutive amino acid residues. In some embodiments, there are three or more staples within 15 consecutive amino acid residues. In some embodiments, there are three or more staples within 16 consecutive amino acid residues. In some embodiments, there are three or more staples within 17 consecutive amino acid residues. In some embodiments, there are three or more staples within 18 consecutive amino acid residues. In some embodiments, there are three or more staples within 19 consecutive amino acid residues. In some embodiments, there are three or more staples within 20 consecutive amino acid residues. In some embodiments, two staples are bonded to the same amino acid residue. In some embodiments, two staples are bonded to the same backbone atom. In some embodiments, two staples are bonded to the same backbone carbon atom. In some embodiments, two staples are bonded to an alpha-carbon atom of an amino acid residue, and each independently bonds to another amino acid residue.

[0013] In some embodiments, a first staple in an agent, e.g., a staple peptide, are bonded to amino acid residues at positions i and i+3. In some embodiments, there is a second staple bonded to amino acid residues at positions i+3 and i+10. In some embodiments, there a third staple bonded to amino acid residues at positions i+9 and i+13. Those skilled in the art appreciate that as used in the art, i, i+3, i+9, i+10, i+13, etc. are routinely utilized to indicate relevant positions of amino acid residues. In some embodiments, they may also indicate absolute positions in an agent, e.g., a peptide. In some embodiments, i is an integer of 1-50 (e.g., 1, 2, 3, 4, 5, 6, 7, 8, 9, 10, 11, 12, 13, 14, 15, 16, 17, 18, 19, or 20). In some embodiments, i is 1. In some embodiments, there is a fourth staple in an agent, e.g., a stapled peptide.

[0014] In some embodiments, there are two amino acid residues between two amino acid residues bonded to the same staple. Such a staple may be referred to as a (i, i+3) staple. Similarly, in some embodiments, there are 3, 4, 5, 6, 7, 8, 9, or 10 amino acid residues between two amino acid residues bonded to the same staple, and such a staple may be referred to as a (i, i+4), (i, i+5), (i, i+6), (i, i+7), (i, i+8), (i, i+9), (i, i+10), or (i, i+11) staple, respectively.

[0015] In some embodiments, an agent, e.g., a stapled peptide, comprises a (i, i+2) staple and a (i, i+7) staple. In some embodiments, an agent, e.g., a stapled peptide, comprises a (i, i+3) staple and a (i, i+7) staple. In some embodiments, a (i, i+3) staple and (i, i+7) staple are bonded to the same amino acid residue. In some embodiments, a (i, i+3) staple and (i, i+7) staple bond to the same atom. In some embodiments, a (i, i+3) staple and (i, i+7) staple bond to the same alpha carbon atom. For example, in compound I-1, a (i, i+3) staple is bonded to amino acid residues at positions 1 and 4, and a (i, i+7) staple is bonded to amino acid residues at positions 4 and 11, and the two staples are both bonded to the alpha carbon of the amino acid residue at position 4. In some embodiments, an agent further comprises a third staple. In some embodiments, a third staple is (i, i+4). In some embodiments, a third staple is (i, i+7). In some embodiments, a third staple is not bonded to any of the amino acid residues that are bonded to the first two staples. In some embodiments, an agent further comprises a fourth staple. In some embodiments, a fourth staple is (i, i+4). In some embodiments, a fourth staple is (i, i+7). In some embodiments, a fourth staple is not bonded to any of the amino acid residues that are bonded to the first two staples. In some embodiments, a fourth staple is not bonded to any of the amino acid residues that are bonded to the first third staples.

[0016] In some embodiments, a provided agent, e.g., a peptide agent such as a stapled peptide agent, comprises one or more (e.g., 1, 2, 3, 4, 5, 6, or 7) of the following groups (in some embodiments, from the N to C direction):
[0017] a first acidic group (e.g., of a first acidic amino acid residue);
[0018] a second acidic group (e.g., of a second acidic amino acid residue);
[0019] optionally a third acidic group (e.g., of a third acidic amino acid residue);
[0020] optionally a hydrophobic group (e.g., of a hydrophobic amino acid residue)
[0021] a first aromatic group (e.g., of a first aromatic amino acid residue);
[0022] a second aromatic group (e.g., of a first aromatic amino acid residue); and
[0023] a third aromatic group (e.g., of a third aromatic amino acid residue).

[0024] In some embodiments, an agent comprises a first and second acidic group and a first, second and third aromatic group. In some embodiments, such an agent additionally comprises a third acidic group (e.g., of a third acid amino acid residue) and/or a hydrophobic group (e.g., of a hydrophobic amino acid residue). In some embodiments, such an agent additionally comprises a third acidic group (e.g., of a third acid amino acid residue) and a hydrophobic group (e.g., of a hydrophobic amino acid residue). In some embodiments, the distance between a first acidic group and a second acidic group is about the distance between the acidic groups of two acidic amino acid residues of a peptide motif, wherein there are two amino acid residues between the two acidic amino acid residues (e.g., if the first acidic amino acid residue is at position N, the second is at position N+3), the distance between a first acidic group and a third acidic group (if present) is about the distance between the acidic groups of two acidic amino acid residues of a peptide motif, wherein there are three amino acid residues between the two acidic amino acid residues (e.g., if the first acidic amino acid residue is at position N, the third is at position N+4), the distance between a first acidic group and a hydrophobic group (if present) is about the distance between the acidic group of an acidic amino acid residue and the hydrophobic group of a hydrophobic amino acid residue of a peptide motif, wherein there are five amino acid residues between the first acidic amino acid residue and the hydrophobic amino acid residue (e.g., if the first acidic amino acid residue is at position N, the hydrophobic amino acid residue is at position N+6), the distance between a first acidic group and a first aromatic group is about the distance between the acidic group of a first acidic amino acid residue and the aromatic group of an aromatic amino acid residue of a peptide motif, wherein there are six amino acid residues between the first acidic amino acid residue and the first aromatic amino acid residue (e.g., if the first acidic amino acid residue is at position N, the first aromatic amino acid residue is at position N+7), the distance between the first aromatic group and the second aromatic group is about the distance between the aromatic groups of two aromatic amino acid residues of a peptide motif, wherein there are two amino acid residues between the two aromatic amino acid residues (e.g., if the first aromatic amino acid residue is at position M, the second is at position M+3), and/or the distance between the first aromatic group and the third aromatic group is about the distance between the aromatic groups of two aromatic amino acid residues of a peptide motif, wherein there are three amino acid residues between the two aromatic amino acid residues (e.g., if the first aromatic amino acid residue is at position M, the third is at position M+4). In some embodiments, a first acidic amino acid residue is at position N, a second acidic amino acid residue is at position N+3, and a first, second and third aromatic amino acid residue are at positions N+7, N+10 and N+11, respectively. In some embodiments, a first acidic amino acid residue is at position N, a second acidic amino acid residue is at position N+3, a third acidic amino acid residue is at position N+4, and a first, second and third aromatic amino acid residue are at positions N+7, N+10 and N+11, respectively. In some embodiments, a first acidic amino acid residue is at position N, a second acidic amino acid residue is at position N+3, a hydrophobic amino acid residue is at position N+6, and a first, second and third aromatic amino acid residue are at positions N+7, N+10 and N+11, respectively. In some embodiments, a first acidic amino acid residue is at position N, a second acidic amino acid residue is at position N+3, a third acidic amino acid residue is at position N+4, a hydrophobic amino acid residue is at position N+6, and a first, second and third aromatic amino acid residue are at positions N+7, N+10 and N+11, respectively. In some embodiments, M is N+7. In some embodiments, N is 1-7. In some embodiments, Nis 1, 2, 3, 4, or 5. In some embodiments, N is 1. In some embodiments, N is 2. In some embodiments, N is 3. In some embodiments, N is 4. In some embodiments, N is 5. In some embodiments, M is 8-16. In some embodiments, M is 8. In some embodiments, M is 9. In some embodiments, M is 10. In some embodiments, M is 11. In some embodiments, M is 12. In some embodiments, M is 13. In some embodiments, a peptide motif is an alpha-helical motif wherein each amino acid residue is independently an alpha amino acid residue. In some embodiments, a peptide motif is stapled. In some embodiments, there are two or more staples in a peptide motif; in some embodiments, there are three; in some embodiments, there are four; in some embodiments, there are four or more. In some embodiments, a peptide motif is or comprises an agent described in a Table herein (e.g., I-xxxx wherein xxxx is a number (e.g., I-1, I-10, I-100, I-1000, etc.)). In some embodiments, a first acidic group is of X² as described herein, a second acidic group is of X⁵ as described herein, a third acidic group (if present) is of X⁶ as described herein, a hydrophobic group (if present) is of X⁸ as described herein, a first aromatic group is of X⁹ as described herein, a second aromatic group is of X¹² as described herein, and/or a third aromatic group is of X¹³ as described herein. In some embodiments, as described herein, a provided agent is a stapled peptide comprising one or more staples. In some embodiments, as described herein, a provided agent is a stapled peptide comprising two or more staples. In some embodiments, as described herein, a provided agent is a stapled peptide comprising three or more staples. In some embodiments, when contacted with a beta-catenin polypeptide, a first acidic group interacts with Lys312 and/or Gly307 or amino acid residues corresponding thereto, a second acidic group interacts with Asn387, Trp383 and/or Arg386 or amino acid residues corresponding thereto, a first aromatic group interacts with Lys345 and/or Trp383 or amino acid residues corresponding thereto, a second aromatic group interacts with Trp383 and/or Asn415 or amino acid residues corresponding thereto, and a third aromatic group interacts with Gln379, Leu383, Val416, Asn415 and/or Trp383 or amino acid residues corresponding thereto. In some embodiments, a third acidic group interacts with Asn387, Trp383 and/or Arg386 or amino acid residues corresponding thereto. In some embodiments, a hydrophobic group interacts with Trp383 or an amino acid residue corresponding thereto.

[0025] In some embodiments, the present disclosure provides an agent having the structure of formula I:

or a salt thereof, wherein each variable is independently as described herein.

[0026] In some embodiments, the present disclosure provides an agent which is or comprises a peptide comprising:

wherein:
[0027] each of p0, p15, p16 and p17 is independently 0 or 1;
[0028] each of X⁰, X¹, X², X³, X⁴, X⁵, X⁶, X⁷, X⁸, X⁹, X¹⁰, X¹¹, X¹², X¹³, X¹⁴, X¹⁵, X¹⁶, and X¹⁷ is independently an amino acid residue.

[0029] In some embodiments, the present disclosure provides an agent which is or comprises a peptide comprising:

wherein:
[0030] each of p15, p16 and p17 is independently 0 or 1;
[0031] each of p and p′ is independently 0-10;
[0032] each of X, X¹, X², X³, X⁴, X⁵, X⁶, X⁷, X⁸, X⁹, X¹⁰, X¹¹, X¹², X¹³, X¹⁴, X¹⁵, X¹⁶, and X¹⁷ is independently an amino acid residue.

[0033] In some embodiments, an agent is R^{N}_[X]pX¹X²X³X⁴X⁵X⁶X⁷X⁸X⁹X¹⁰X¹¹X¹²X¹³[X¹⁴]ₚ₁₄[X¹⁵]ₚ₁₅[X¹⁶]ₚ₁₆[X¹⁷]ₚ₁₇[X]p′-R^{C}, wherein each variable is independently as described herein.

[0034] In some embodiments, an agent is or comprises X¹X²X³X⁴X⁵X⁶X⁷X⁸X⁹X¹⁰X¹¹X¹²X¹³[X¹⁴]ₚ₁₄[X¹⁵]ₚ₁₅[X¹⁶]ₚ₁₆[X¹⁷]ₚ₁₇[X¹⁸]ₚ₁₈[X¹⁹]ₚ₁₉[X²⁰]ₚ₂₀[X²¹]ₚ₂₁[X²²]ₚ₂₂[X²³]_{p 23}, wherein each of p14, p15, p16, p17, p18, p19, p20, p21, p22, and p23 is independently 0 or 1, and each of X¹, X², X³, X⁴, X⁵, X⁶, X⁷, X⁸, X⁹, X¹⁰, X¹¹, X¹², X¹³, X¹⁴, X¹⁵, X¹⁶, X¹⁷, X¹⁸, X¹⁹, X²⁰, X²¹, X²², and X²³ is independently an amino acid residue as described herein.

[0035] In some embodiments, such a peptide comprises three or more staples. In some embodiments, such a peptide comprises five or more residues suitable for stapling.

[0036] In some embodiments, the present disclosure provides an agent, wherein the agent is or comprises a peptide comprising:

wherein:
[0037] each of p0, p15, p16 and p17 is independently 0 or 1;
[0038] each of X⁰, X¹, X², X³, X⁴, X⁵, X⁶, X⁷, X⁸, X⁹, X¹⁰, X¹¹, X¹², X¹³, X¹⁴, X¹⁵, X¹⁶, and X¹⁷ is independently an amino acid residue, wherein:
[0039] X² comprises a side chain comprising an acidic or a polar group;
[0040] X⁵ comprises a side chain comprising an acidic or a polar group;
[0041] X¹³ comprises a side chain comprising an optionally substituted aromatic group; and
[0042] two or more of X¹, X³, X⁴, X⁷, X¹⁰, X¹¹ and X¹⁴ are each independently an amino acid residue suitable for stapling, or are each independently stapled.

[0043] In some embodiments, the present disclosure provides an agent, wherein the agent is or comprises a peptide comprising:

wherein:
[0044] each of p0, p15, p16 and p17 is independently 0 or 1;
[0045] each of X⁰, X¹, X², X³, X⁴, X⁵, X⁶, X⁷, X⁸, X⁹, X¹⁰, X¹¹, X¹², X¹³, X¹⁴, X¹⁵, X¹⁶, and X¹⁷ is independently an amino acid residue, wherein:
[0046] X² comprises a side chain comprising an acidic or a polar group;
[0047] X⁵ comprises a side chain comprising an acidic or a polar group;
[0048] X⁶ comprises a side chain comprising an acidic or a polar group;
[0049] X¹³ comprises a side chain comprising an optionally substituted aromatic group; and
[0050] two or more of X¹, X³, X⁴, X⁷, X¹⁰, X¹¹ and X¹⁴ are each independently an amino acid residue suitable for stapling, or are each independently stapled.

[0051] In some embodiments, an agent is or comprises a peptide. In some embodiments, an agent is or comprises a stapled peptide. In some embodiments, an agent is a peptide. In some embodiments, an agent is a stapled peptide. In some embodiments, an agent, a peptide, or a stapled peptide has the structure of [X⁰]ₚ₀X¹X²X³X⁴X⁵X⁶X⁷X⁸X⁹X¹⁰X¹X¹²X¹³X¹⁴[X¹⁵]ₚ₁₅[X¹⁶]ₚ₁₆[X¹⁷]ₚ₁₇. In some embodiments, X¹ and X⁴ and/or X⁴ and X¹¹ are independently amino acid residues suitable for stapling, or are stapled, or X³ and X¹⁰ independently amino acid residues suitable for stapling, or are stapled. In some embodiments, X¹ and X⁴ are independently amino acid residues suitable for stapling. In some embodiments, X¹ and X⁴ are stapled. In some embodiments, X⁴ and X¹¹ are independently amino acid residues suitable for stapling. In some embodiments, X⁴ and X¹¹ are stapled. In some embodiments, X¹ and X⁴, and X⁴ and X¹¹ are independently amino acid residues suitable for stapling. In some embodiments, a stapled peptide is a stitched peptide comprising two or more staples, some of which may bond to the same backbone atom. In some embodiments, X¹ and X⁴ are stapled, and X⁴ and X¹¹ are stapled. In some embodiments, a staple connecting X¹ and X⁴ and a staple connecting X⁴ and X¹¹ are bonded to a common backbone atom of X⁴. In some embodiments, a common backbone atom is the alpha-carbon of X⁴. In some embodiments, X³ and X¹⁰ are independently amino acid residues suitable for stapling. In some embodiments, X³ and X¹⁰ are stapled. In some embodiments, X¹ and X³ are independently amino acid residues suitable for stapling. In some embodiments, X¹ and X³ are stapled. In some embodiments, X¹⁰ and X¹⁴ are independently amino acid residues suitable for stapling. In some embodiments, X¹⁰ and X¹⁴ are stapled. In some embodiments, X⁷ and X¹⁰ are independently amino acid residues suitable for stapling. In some embodiments, X⁷ and X¹⁰ are stapled. In some embodiments, X⁷ and X¹⁴ are independently amino acid residues suitable for stapling. In some embodiments, X⁷ and X¹⁴ are stapled. In some embodiments, X³ and X⁷ are independently amino acid residues suitable for stapling. In some embodiments, X³ and X⁷ are stapled.

[0052] In some embodiments, the present disclosure provides agents that bind to a polypeptide comprising or consisting of residues 305-419 of SEQ ID NO: 1 as described herein. In some embodiments, an agent, e.g., a peptide, has a molecular mass of no more than about 5000 Daltons. In some embodiments, it is no more than about 2500, 3000, 3500, 4000, 4500 or 5000 Daltons. In some embodiments, it is no more than about 2500 Daltons. In some embodiments, it is no more than about 3000 Daltons. In some embodiments, it is no more than about 3500 Daltons. In some embodiments, it is no more than about 4000 Daltons. In some embodiments, it is no more than about 500 Daltons.

[0053] In some embodiments, the present disclosure provides various technologies, e.g., reagents, methods, etc., for preparing, characterizing, assessing and using provided agents and compositions thereof. In some embodiments, the present disclosure provides, e.g., methods, reagents and/or systems for identifying, characterizing and/or assessing provided agents and use thereof (e.g., as therapeutic or diagnostic agents).

[0054] In some embodiments, the present disclosure provides pharmaceutical compositions comprising or delivering a provided agent and a pharmaceutical acceptable carrier. In some embodiments, a provided agent is a pharmaceutically acceptable salt form. In some embodiments, a provided composition comprises a pharmaceutically acceptable salt form an agent. In some embodiments, in various compositions and methods, agents are provided as pharmaceutically acceptable salt forms.

[0055] In some embodiments, the present disclosure provides methods for modulating a property, activity and/or function of beta-catenin, comprising contacting beta-catenin with a provided agent. In some embodiments, the present disclosure provides methods for modulating a property, activity and/or function of beta-catenin in a system comprising or expressing beta-catenin, comprising administering or delivering to a system an effective amount of a provided agent. In some embodiments, an activity or function of beta-catenin is inhibited or reduced. In some embodiments, a property, activity and/or function is associated with beta-catenin/TCF interaction.

[0056] In some embodiments, the present disclosure provides methods for modulating beta-catenin/TCF interaction, comprising contacting beta-catenin with a provided agent. In some embodiments, the present disclosure provides methods for modulating beta-catenin/TCF interaction in a system comprising or expressing beta-catenin and TCF, comprising administering or delivering to the system an effective amount a provided agent. In some embodiments, interactions between beta-catenin and TCF is reduced. In some embodiments, interactions between beta-catenin and TCF is inhibited.

[0057] In some embodiments, the present disclosure provides methods for inhibiting cell proliferation, comprising administering or delivering to a population of cells an effective amount of a provided agent. In some embodiments, the present disclosure provides methods for inhibiting cell proliferation in a system, comprising administering or delivering to the system an effective amount of a provided agent. In some embodiments, the present disclosure provides methods for inhibiting cell growth, comprising administering or delivering to a population of cells an effective amount of a provided agent. In some embodiments, the present disclosure provides methods for inhibiting cell growth in a system, comprising administering or delivering to the system an effective amount of a provided agent. In some embodiments, such cell proliferation is beta-catenin dependent. In some embodiments, such cell growth is beta-catenin dependent. In some embodiments, such proliferation or growth is dependent on beta-catenin interactions with TCF.

[0058] In some embodiments, a system is in vitro. In some embodiments, a system is ex vivo. In some embodiments, a system is in vivo. In some embodiments, a system is or comprise a cell. In some embodiments, a system is or comprises a tissue. In some embodiments, a system is or comprises an organ. In some embodiments, a system is or comprises an organism. In some embodiments, a system is an animal. In some embodiments, a system is human. In some embodiments, a system is or comprises cells, tissues or organs associated with a condition, disorder or disease. In some embodiments, a system is or comprises cancer cells. In some embodiments, a system comprises a mutation as described herein.

[0059] In some embodiments, the present disclosure provides methods for treating conditions, disorders or diseases. In some embodiments, the present disclosure provides methods for treating a condition, disorder or disease, comprising administering or delivering to a subject suffering therefrom an effective amount of an agent of the present disclosure. In some embodiments, a symptom is reduced, removed or prevented. In some embodiments, one or more parameters for assessing a condition, disorder or disease are improved. In some embodiments, survivals of subjects are extended. As appreciated by those skilled in the art, in some embodiments, prevention, reduced risks, and/or effects of treatment may be assessed through clinical trials and may be observed in subject populations. In some embodiments, a condition, disorder or disease is cancer. In some embodiments, a condition, disorder or disease is associated with beta-catenin. In some embodiments, a condition, disorder or disease is associated with beta-catenin interaction with TCF. In some embodiments, a condition, disorder or disease is bladder cancer. In some embodiments, a condition, disorder or disease is endometrial cancer. In some embodiments, a condition, disorder or disease is adrenocortical carcinoma. In some embodiments, a condition, disorder or disease is gastric cancer. In some embodiments, a condition, disorder or disease is lung cancer. In some embodiments, a condition, disorder or disease is melanoma. In some embodiments, a condition, disorder or disease is esophageal cancer. In some embodiments, a condition, disorder or disease is colorectal cancer. In some embodiments, a cancer is liver cancer. In some embodiments, a cancer is prostate cancer. In some embodiments, a cancer is breast cancer. In some embodiments, a cancer is endometrial cancer.

[0060] In some embodiments, agents are administered as pharmaceutically compositions that comprise or deliver such agents. In some embodiments, agents are provided and/or delivered in pharmaceutically acceptable salt forms. In some embodiments, in a composition (e.g., a liquid composition of certain pH) an agent may exist in various forms including various pharmaceutically acceptable salt forms.

[0061] In some embodiments, a provided agent is utilized in combination with a second therapy. In some embodiments, a provided agent is utilized in combination with a second therapeutic agent. In some embodiments, a second therapy or therapeutic agent is administered prior to an administration or delivery of a provided agent. In some embodiments, a second therapy or therapeutic agent is administered at about the same time as an administration or delivery of a provided agent. In some embodiments, a second therapy or therapeutic agent is administered subsequently to an administration or delivery of a provided agent. In some embodiments, a subject is exposed to both a provided agent and a second therapeutic agent. In some embodiments, a subject is exposed to a therapeutic effect of a provided agent and a therapeutic effect of a second therapeutic agent. In some embodiments, a second therapy is or comprises surgery. In some embodiments, a second therapy is or comprises radiation therapy. In some embodiments, a second therapy is or comprises immunotherapy. In some embodiments, a second therapeutic agent is or comprises a drug. In some embodiments, a second therapeutic agent is or comprises a cancer drug. In some embodiments, a second therapeutic agent is or comprises a chemotherapeutic agent. In some embodiments, a second therapeutic agent is or comprises a hormone therapy agent. In some embodiments, a second therapeutic agent is or comprises a kinase inhibitor. In some embodiments, a second therapeutic agent is or comprises a checkpoint inhibitor (e.g., antibodies against PD-1, PD-L1, CTLA-4, etc.). In some embodiments, a provide agent can be administered with lower unit dose and/or total dose compared to being used alone. In some embodiments, a second agent can be administered with lower unit dose and/or total dose compared to being used alone. In some embodiments, one or more side effects associated with administration of a provided agent and/or a second therapy or therapeutic agent are reduced. In some embodiments, a combination therapy provides improved results, e.g., when compared to each agent utilized individually. In some embodiments, a combination therapy achieves one or more better results, e.g., when compared to each agent utilized individually.

[0062] Further description of certain embodiments of provided technologies is presented below.

### BRIEF DESCRIPTION OF THE DRAWING

[0063] FIG. 1. Provided technologies can inhibit beta-catenin driven gene transcription selectively in cells expressing beta-catenin. Stapled peptides inhibited endogenous gene expression in wild HAP1 isogenic cell but not in CTNNB1 knockout (KO) cells. (A): beta-catenin levels. CHIR: CHIR99021, which can activate beta-catenin pathway and increase AXIN2 and SP5 expression. (B): SP5 expression (24h). (C): AXIN2 expression (24h). For each group, from left to right, DMSO (“0” and “0”), Peptide A (1 and 5 uM), I-66 (1 and 5 uM) and I-470 (1 and 5 uM). Expression assessed after 24 hour treatment.

[0064] FIG. 2. Provided technologies can reduce nuclear beta-catenin levels. Results for total beta-catenin in nuclear fraction (24 h) are shown as examples.

[0065] FIG. 3. Provided technologies can inhibit cell proliferation, modulate transcription and/or induce cell cycle arrest. (A): Provided technologies can reduce cell proliferation. (B) and (C): Provided technologies can modulate gene expression. (B): AXIN 24 hr. (C): CXCL12 24 hr. (D): Provided technologies can induce cell cycle arrest. For left to right: Peptide A (1, 5 and 10 uM), I-66 (1, 5 and 10 uM), I-470 (1, 5 and 10 uM) and DMSO.

[0066] FIG. 4. Provided technologies can provide robust, dose-dependent anti-tumor effects in vivo. Both dose levels assessed provided robust reduction of tumor sizes, and the higher dose levels provided greater reductions. COLO320DM cells (colon cancer, mutations: APC, TP53) were utilized for the presented data. Top line is for vehicle treatment, the middle line is for I-66, 30 mg/kg, Q4D, and the bottom line is for I-66, 75 mg/kg, Q4D.

[0067] FIG. 5. Provided technologies can provide sustained tumor exposure, suitable pharmacokinetic profiles and broad tissue distribution. (A): Sustained COLO320DM xenograft tumor exposure after a single i.p. injection of I-66 at 50 mg/kg was shown as an example. Dotted line indicates in vitro proliferation IC₅₀ (0.7 uM). (B): Mouse plasma pharmacokinetics. Data presented are I-66 plasma concentration (ng/ml) over time as examples. (C): Tissue distribution observed for I-66 in one assessment. Mouse single dose IP, 50 mg/kg. For each sample, the left column is 24 h data and the right is 96 h data.

[0068] FIG. 6. ¹H NMR of a preparation of I-66 prepared as described in Example 3 (DMSO-d6, 373K).

[0069] FIG. 7. Integration of peaks in a ¹H NMR spectrum of a preparation of I-66 prepared as described in Example 3 (DMSO-d6, 373K). Those skilled in the art appreciate that integration may be further adjusted and/or optimized.

[0070] FIG. 8. Provided technologies can provide robust anti-tumor effects in vivo in multiple tumor models. (A): Certain data from a colorectal (CRC) patient derived xenograft PDX) tumor model. (B): Certain data from another colorectal (CRC) patient derived xenograft PDX) tumor model.

[0071] FIG. 9. ¹H NMR of a preparation of I-66 as an example. Solvent: methanol-d4. About 10 mg/750 μL. Temperature: 298 K. Number of scans: 8. Receiver gain: 30.1. Relaxation Delay: 2.5000. Acquisition Time: 1.5139. Spectrometer Frequency: 900.30 MHz. Spectra Width: 10822.5. Lowest Frequency: −927.2. Acquired Size: 16384. Spectral Size: 65536. Digital Resolution: 0.17.

[0072] FIG. 10. A region of ¹H NMR of I-66 as an example. Top: 900 MHz ¹H of a preparation of I-66 in methanol-d4, 298 K, about 10 mg/750 μL. Bottom: 500 MHz ¹H of a preparation of I-66 in methanol-d4, 298 K, about 10 mg/500 μL. As shown here, the top spectra can provide improved resolution for various peaks.

[0073] FIG. 11. A region of ¹H NMR of I-66 as an example. Top: 900 MHz ¹H of a preparation of I-66 in methanol-d4, 298 K, about 10 mg/750 μL. Bottom: 500 MHz ¹H of a preparation of I-66 in methanol-d4, 298 K, about 10 mg/500 μL. As shown here, the top spectra can provide improved resolution for various peaks; certain NH peaks at about 7.7 ppm that were observed in the 500 MHz data were absent in the 900 MHz data. As those skilled in the art appreciate, NH peaks may change depending on sample environments.

[0074] FIG. 12. ¹³C NMR of a preparation of I-66 as an example. Solvent: methanol-d4. About 10 mg/750 μL. Temperature: 298 K. Number of scans: 8108. Receiver gain: 177.2. Relaxation Delay: 1.5000. Acquisition Time: 0.3277. Spectrometer Frequency: 226.40 MHz. Spectra Width: 50000.0. Lowest Frequency: −911.8. Acquired Size: 16384. Spectral Size: 65536. Digital Resolution: 0.76.

[0075] FIG. 13. COSY of a preparation of I-66 as an example. Solvent: methanol-d4. About 10 mg/750 μL. Temperature: 298 K. Number of scans: 4. Receiver gain: 30.1. Relaxation Delay: 2.0000. Acquisition Time: 0.2272. Spectrometer Frequency: (900.30, 900.30). Spectra Width: (9014.4, 9009.0). Lowest Frequency: (−22.7, −23.3). Nucleus: (¹H, ¹H). Acquired Size: (2048, 1024). Spectral Size: (2048, 1024). Digital Resolution: (4.40, 8.80).

[0076] FIG. 14. ¹H-¹³C HSQC of a preparation of I-66 as an example. Solvent: methanol-d4. About 10 mg/750 μL. Temperature: 298 K. Number of scans: 8. Receiver gain: 177.2. Relaxation Delay: 1.5000. Acquisition Time: 0.1137. Spectrometer Frequency: (900.30, 226.40). Spectra Width: (9009.0, 34013.6). Lowest Frequency: (−22.0, 288.5). Nucleus: (1H, 13C). Acquired Size: (1024, 512). Spectral Size: (1024, 1024). Digital Resolution: (8.80, 33.22).

[0077] FIG. 15. ¹H-¹³C HMBC of a preparation of I-66 as an example. Solvent: methanol-d4. About 10 mg/750 μL. Temperature: 298 K.

[0078] FIG. 16. ¹H-¹H TOCSY of a preparation of I-66 as an example. Solvent: methanol-d4. About 10 mg/750 μL. Temperature: 298 K. Number of scans: 8. Receiver gain: 57.7. Relaxation Delay: 2.0000. Acquisition Time: 0.2272. Spectrometer Frequency: (900.30, 900.30). Spectra Width: (9014.4, 9009.0). Lowest Frequency: (−21.8, −23.3). Acquired Size: (2048, 800). Spectral Size: (2048, 1024). Digital Resolution: (4.40, 8.80).

[0079] FIG. 17. ¹H-¹H NOESY of a preparation of I-66 as an example. Solvent: methanol-d4. About 10 mg/750 μL. Temperature: 298 K. Number of scans: 8. Receiver gain: 57.7. Relaxation Delay: 2.0000. Acquisition Time: 0.2272. Spectrometer Frequency: (900.30, 900.30). Spectra Width: (9014.4, 9009.0). Lowest Frequency: (−5.7, −3.0). Acquired Size: (2048, 1024). Spectral Size: (2048, 1024). Digital Resolution: (4.40, 8.80).

[0080] FIG. 18. Expansion of ¹H-¹H NOESY of a preparation of I-66 as an example. Solvent: methanol-d4. About 10 mg/750 μL. Temperature: 298 K. Number of scans: 8. Receiver gain: 57.7. Relaxation Delay: 2.0000. Acquisition Time: 0.2272. Spectrometer Frequency: (900.30, 900.30). Spectra Width: (9014.4, 9009.0). Lowest Frequency: (−5.7, −3.0). Acquired Size: (2048, 1024). Spectral Size: (2048, 1024). Digital Resolution: (4.40, 8.80). As shown herein, NOE peak between the olefin protons of the PL3-B5 staple (111 and 112) was observed. In some embodiments, this peak was stronger than the NOE peak between neighboring aromatic protons of 3Thi (20 and 21), and/or of the p and m protons in the phenyl group of Phe (48 and 47/49).

[0081] FIG. 19. Provided technologies can provide robust anti-tumor effects in vivo. Hepatocellular PDX models. Rectangles: vehicle (10 mg/mL arginine/6% PEG400 phosphate); filled circles: I-66. (A): beta-catenin D32V mutant. IP dosing Q4D, n=5/group. (B): beta-catenin D32H mutant. IP dosing Q7D, n=5/group.

[0082] FIG. 20. Provided technologies can provide robust anti-tumor effects in vivo. Hepatocellular PDX models. Tumor volume (mm³) assessed at multiple days after administration of various doses of I-66. Rectangles: vehicle (10 mM sodium phosphate dibasic, 10 mg/mL arginine and 6% PEG400 phosphate (pH 8.0)); filled circles: I-66. (A): beta-catenin D32V mutant. IP dosing Q4D, n=5/group. (B): beta-catenin D32H mutant. IP dosing Q7D, n=5/group. Error bars are standard error of the mean (SEM).

[0083] FIG. 21. Provided technologies can provide robust anti-tumor effects in vivo. Hepatocellular PDX models. Tumor volume (mm³) assessed at multiple days after administration of various doses of I-66. Rectangles: vehicle (10 mM sodium phosphate dibasic, 10 mg/mL arginine and 6% PEG400 phosphate (pH 8.0)); filled circles: I-66. (A): beta-catenin S45F mutant. IP dosing Q4D, n=5/group. (B): beta-catenin S37C mutant. IP dosing Q7D, n=5/group. Error bars are standard error of the mean (SEM).

### DETAILED DESCRIPTION OF CERTAIN EMBODIMENTS

### Definitions

[0084] As used herein, the following definitions shall apply unless otherwise indicated. For purposes of this disclosure, the chemical elements are identified in accordance with the Periodic Table of the Elements, CAS version, Handbook of Chemistry and Physics, 75^{th} Ed. Additionally, general principles of organic chemistry are described in “Organic Chemistry”, Thomas Sorrell, University Science Books, Sausalito: 1999, and “March's Advanced Organic Chemistry”, 5^{th} Ed., Ed.: Smith, M. B. and March, J., John Wiley & Sons, New York: 2001.

[0085] Administration: As used herein, the term “administration” typically refers to the administration of a composition to a subject or system. Those of ordinary skill in the art will be aware of a variety of routes that may, in appropriate circumstances, be utilized for administration to a subject, for example a human. For example, in some embodiments, administration may be ocular, oral, parenteral, topical, etc. In some particular embodiments, administration may be bronchial (e.g., by bronchial instillation), buccal, dermal (which may be or comprise, for example, one or more of topical to the dermis, intradermal, interdermal, transdermal, etc), enteral, intra-arterial, intradermal, intragastric, intramedullary, intramuscular, intranasal, intraperitoneal, intrathecal, intravenous, intraventricular, within a specific organ (e. g., intrahepatic), mucosal, nasal, oral, rectal, subcutaneous, sublingual, topical, tracheal (e.g., by intratracheal instillation), vaginal, vitreal, etc. In some embodiments, administration may involve dosing that is intermittent (e.g., a plurality of doses separated in time) and/or periodic (e.g., individual doses separated by a common period of time) dosing. In some embodiments, administration may involve continuous dosing (e.g., perfusion) for at least a selected period of time.

[0086] Affinity: As is known in the art, “affinity” is a measure of the tightness with a particular ligand (e.g., an agent) binds to its partner (e.g., beta-catenin or a portion thereof). Affinities can be measured in different ways. In some embodiments, affinity is measured by a quantitative assay. In some such embodiments, binding partner concentration may be fixed to be in excess of ligand concentration so as to mimic physiological conditions. Alternatively or additionally, in some embodiments, binding partner concentration and/or ligand concentration may be varied. In some such embodiments, affinity may be compared to a reference under comparable conditions (e.g., concentrations).

[0087] Agent: In general, the term “agent”, as used herein, may be used to refer to a compound or entity of any chemical class including, for example, a polypeptide, nucleic acid, saccharide, lipid, small molecule, metal, or combination or complex thereof. In appropriate circumstances, as will be clear from context to those skilled in the art, the term may be utilized to refer to an entity that is or comprises a cell or organism, or a fraction, extract, or component thereof. Alternatively or additionally, as context will make clear, the term may be used to refer to a natural product in that it is found in and/or is obtained from nature. In some instances, again as will be clear from context, the term may be used to refer to one or more entities that is man-made in that it is designed, engineered, and/or produced through action of the hand of man and/or is not found in nature. In some embodiments, an agent may be utilized in isolated or pure form; in some embodiments, an agent may be utilized in crude form. In some embodiments, potential agents may be provided as collections or libraries, for example that may be screened to identify or characterize active agents within them. In some cases, the term “agent” may refer to a compound or entity that is or comprises a polymer; in some cases, the term may refer to a compound or entity that comprises one or more polymeric moieties. In some embodiments, the term “agent” may refer to a compound or entity that is not a polymer and/or is substantially free of any polymer and/or of one or more particular polymeric moieties. In some embodiments, the term may refer to a compound or entity that lacks or is substantially free of any polymeric moiety. In some embodiments, an agent is a compound. In some embodiments, an agent is a stapled peptide.

[0088] Aliphatic: As used herein, “aliphatic” means a straight-chain (i.e., unbranched) or branched, substituted or unsubstituted hydrocarbon chain that is completely saturated or that contains one or more units of unsaturation, or a substituted or unsubstituted monocyclic, bicyclic, or polycyclic hydrocarbon ring that is completely saturated or that contains one or more units of unsaturation (but not aromatic), or combinations thereof. In some embodiments, aliphatic groups contain 1-50 aliphatic carbon atoms. In some embodiments, aliphatic groups contain 1-20 aliphatic carbon atoms. In other embodiments, aliphatic groups contain 1-10 aliphatic carbon atoms. In other embodiments, aliphatic groups contain 1-9 aliphatic carbon atoms. In other embodiments, aliphatic groups contain 1-8 aliphatic carbon atoms. In other embodiments, aliphatic groups contain 1-7 aliphatic carbon atoms. In other embodiments, aliphatic groups contain 1-6 aliphatic carbon atoms. In still other embodiments, aliphatic groups contain 1-5 aliphatic carbon atoms, and in yet other embodiments, aliphatic groups contain 1, 2, 3, or 4 aliphatic carbon atoms. Suitable aliphatic groups include, but are not limited to, linear or branched, substituted or unsubstituted alkyl, alkenyl, alkynyl groups and hybrids thereof such as (cycloalkyl)alkyl, (cycloalkenyl)alkyl or (cycloalkyl)alkenyl.

[0089] Alkenyl: As used herein, the term “alkenyl” refers to an aliphatic group, as defined herein, having one or more double bonds.

[0090] Alkyl: As used herein, the term “alkyl” is given its ordinary meaning in the art and may include saturated aliphatic groups, including straight-chain alkyl groups, branched-chain alkyl groups, cycloalkyl (alicyclic) groups, alkyl substituted cycloalkyl groups, and cycloalkyl substituted alkyl groups. In some embodiments, alkyl has 1-100 carbon atoms. In certain embodiments, a straight chain or branched chain alkyl has about 1-20 carbon atoms in its backbone (e.g., C₁-C₂₀ for straight chain, C₂-C₂₀ for branched chain), and alternatively, about 1-10. In some embodiments, cycloalkyl rings have from about 3-10 carbon atoms in their ring structure where such rings are monocyclic, bicyclic, or polycyclic, and alternatively about 5, 6 or 7 carbons in the ring structure. In some embodiments, an alkyl group may be a lower alkyl group, wherein a lower alkyl group comprises 1-4 carbon atoms (e.g., C₁-C₄ for straight chain lower alkyls).

[0091] Amino acid: In its broadest sense, as used herein, refers to any compound and/or substance that can be incorporated into a polypeptide chain, e.g., through formation of one or more peptide bonds. In some embodiments, an amino acid comprising an amino group and an a carboxylic acid group. In some embodiments, an amino acid has the structure of NH(R^{a1})-L^{a1}-C(R^{a2})(R^{a3})-L^{a2}-COOH, wherein each variable is independently as described in the present disclosure. In some embodiments, an amino acid has the general structure NH(R′)—C(R′)₂—COOH), wherein each R′ is independently as described in the present disclosure. In some embodiments, an amino acid has the general structure H₂N—C(R′)₂—COOH), wherein R′ is as described in the present disclosure. In some embodiments, an amino acid has the general structure H₂N—C(H)(R′)—COOH, wherein R′ is as described in the present disclosure. In some embodiments, an amino acid is a naturally-occurring amino acid. In some embodiments, an amino acid is a non-natural amino acid; in some embodiments, an amino acid is a D-amino acid; in some embodiments, an amino acid is an L-amino acid. “Standard amino acid” refers to any of the twenty standard L-amino acids commonly found in naturally occurring peptides. “Nonstandard amino acid” refers to any amino acid, other than the standard amino acids, regardless of whether it is prepared synthetically or obtained from a natural source. In some embodiments, an amino acid, including a carboxy- and/or amino-terminal amino acid in a polypeptide, can contain a structural modification as compared with the general structure above. For example, in some embodiments, an amino acid may be modified by methylation, amidation, acetylation, pegylation, glycosylation, phosphorylation, and/or substitution (e.g., of the amino group, the carboxylic acid group, one or more protons, one or more hydrogens, and/or the hydroxyl group) as compared with the general structure. In some embodiments, such modification may, for example, alter the circulating half-life of a polypeptide containing the modified amino acid as compared with one containing an otherwise identical unmodified amino acid. In some embodiments, such modification does not significantly alter a relevant activity of a polypeptide containing the modified amino acid, as compared with one containing an otherwise identical unmodified amino acid. As will be clear from context, in some embodiments, the term “amino acid” may be used to refer to a free amino acid; in some embodiments it may be used to refer to an amino acid residue of a polypeptide.

[0092] Analog: As used herein, the term “analog” refers to a substance that shares one or more particular structural features, elements, components, or moieties with a reference substance. Typically, an “analog” shows significant structural similarity with the reference substance, for example sharing a core or consensus structure, but also differs in certain discrete ways. In some embodiments, an analog is a substance that can be generated from the reference substance, e.g., by chemical manipulation of the reference substance. In some embodiments, an analog is a substance that can be generated through performance of a synthetic process substantially similar to (e.g., sharing a plurality of steps with) one that generates the reference substance. In some embodiments, an analog is or can be generated through performance of a synthetic process different from that used to generate the reference substance.

[0093] Animal: As used herein refers to any member of the animal kingdom. In some embodiments, “animal” refers to humans, of either sex and at any stage of development. In some embodiments, “animal” refers to non-human animals, at any stage of development. In certain embodiments, the non-human animal is a mammal (e.g., a rodent, a mouse, a rat, a rabbit, a monkey, a dog, a cat, a sheep, cattle, a primate, and/or a pig). In some embodiments, animals include, but are not limited to, mammals, birds, reptiles, amphibians, fish, insects, and/or worms. In some embodiments, an animal may be a transgenic animal, genetically engineered animal, and/or a clone.

[0094] Approximately: As used herein, the term “approximately” or “about,” as applied to one or more values of interest, refers to a value that is similar to a stated reference value. In certain embodiments, the term “approximately” or “about” refers to a range of values that fall within 25%, 20%, 19%, 18%, 17%, 16%, 15%, 14%, 13%, 12%, 11%, 10%, 9%, 8%, 7%, 6%, 5%, 4%, 3%, 2%, 1%, or less in either direction (greater than or less than) of the stated reference value unless otherwise stated or otherwise evident from the context (except where such number would exceed 100% of a possible value).

[0095] Aryl: The term “aryl” used alone or as part of a larger moiety as in “aralkyl,” “aralkoxy,” “aryloxyalkyl,” etc. refers to monocyclic, bicyclic or polycyclic ring systems having a total of five to thirty ring members, wherein at least one ring in the system is aromatic. In some embodiments, an aryl group is a monocyclic, bicyclic or polycyclic ring system having a total of five to fourteen ring members, wherein at least one ring in the system is aromatic, and wherein each ring in the system contains 3 to 7 ring members. In some embodiments, an aryl group is a biaryl group. The term “aryl” may be used interchangeably with the term “aryl ring.” In certain embodiments of the present disclosure, “aryl” refers to an aromatic ring system which includes, but not limited to, phenyl, biphenyl, naphthyl, binaphthyl, anthracyl and the like, which may bear one or more substituents. In some embodiments, also included within the scope of the term “aryl,” as it is used herein, is a group in which an aromatic ring is fused to one or more non-aromatic rings, such as indanyl, phthalimidyl, naphthimidyl, phenanthridinyl, or tetrahydronaphthyl, and the like, where a radical or point of attachment is on an aryl ring.

[0096] Associated with: Two events or entities are “associated” with one another, as that term is used herein, if the presence, level and/or form of one is correlated with that of the other. For example, a particular entity (e.g., nucleic acid (e.g., genomic DNA, transcripts, mRNA, etc.), polypeptide, genetic signature, metabolite, microbe, etc.,) is considered to be associated with a particular disease, disorder, or condition, if its presence, level and/or form correlates with incidence of and/or susceptibility to the disease, disorder, or condition (e.g., across a relevant population).

[0097] Binding: It will be understood that the term “binding”, as used herein, typically refers to a non-covalent association between or among agents. In many embodiments herein, binding is addressed with respect to particular agents and beta-catenin. It will be appreciated by those of ordinary skill in the art that such binding may be assessed in any of a variety of contexts. In some embodiments, binding is assessed with respect to beta-catenin. In some embodiments, binding is assessed with respect to one or more amino acid residues of beta-catenin. In some embodiments, binding is assessed with respect to one or more amino acid residues corresponding to (e.g., similarly positioned in three dimensional space and/or having certain similar properties and/or functions) those of beta-catenin.

[0098] Binding site: The term “binding site”, as used herein, refers to a region of a target polypeptide, formed in three-dimensional space, that includes one or more or all interaction residues of the target polypeptide. In some embodiments, “binding site” may refer to one or more amino acid residues which comprise or are one or more or all interaction amino acid residues of a target polypeptide. As will be understood by those of ordinary skill in the art, a binding site may include residues that are adjacent to one another on a linear chain, and/or that are distal to one another on a linear chain but near to one another in three-dimensional space when a target polypeptide is folded. A binding site may comprise amino acid residues and/or saccharide residues.

[0099] Carrier: as used herein, refers to a diluent, adjuvant, excipient, or vehicle with which a composition is administered. In some exemplary embodiments, carriers can include sterile liquids, such as, for example, water and oils, including oils of petroleum, animal, vegetable or synthetic origin, such as, for example, peanut oil, soybean oil, mineral oil, sesame oil and the like. In some embodiments, carriers are or include one or more solid components.

[0100] Comparable: As used herein, the term “comparable” refers to two or more agents, entities, situations, sets of conditions, etc., that may not be identical to one another but that are sufficiently similar to permit comparison there between so that one skilled in the art will appreciate that conclusions may reasonably be drawn based on differences or similarities observed. In some embodiments, comparable sets of conditions, circumstances, individuals, or populations are characterized by a plurality of substantially identical features and one or a small number of varied features. Those of ordinary skill in the art will understand, in context, what degree of identity is required in any given circumstance for two or more such agents, entities, situations, sets of conditions, etc. to be considered comparable. For example, those of ordinary skill in the art will appreciate that sets of circumstances, individuals, or populations are comparable to one another when characterized by a sufficient number and type of substantially identical features to warrant a reasonable conclusion that differences in results obtained or phenomena observed under or with different sets of circumstances, individuals, or populations are caused by or indicative of the variation in those features that are varied.

[0101] Composition: Those skilled in the art will appreciate that the term “composition” may be used to refer to a discrete physical entity that comprises one or more specified components. In general, unless otherwise specified, a composition may be of any form—e.g., gas, gel, liquid, solid, etc.

[0102] Cycloaliphatic: The term “cycloaliphatic,” as used herein, refers to saturated or partially unsaturated aliphatic monocyclic, bicyclic, or polycyclic ring systems having, e.g., from 3 to 30, members, wherein the aliphatic ring system is optionally substituted. Cycloaliphatic groups include, without limitation, cyclopropyl, cyclobutyl, cyclopentyl, cyclopentenyl, cyclohexyl, cyclohexenyl, cycloheptyl, cycloheptenyl, cyclooctyl, cyclooctenyl, norbornyl, adamantyl, and cyclooctadienyl. In some embodiments, the cycloalkyl has 3-6 carbons. The terms “cycloaliphatic” may also include aliphatic rings that are fused to one or more aromatic or nonaromatic rings, such as decahydronaphthyl or tetrahydronaphthyl, where a radical or point of attachment is on an aliphatic ring. In some embodiments, a carbocyclic group is bicyclic. In some embodiments, a carbocyclic group is tricyclic. In some embodiments, a carbocyclic group is polycyclic. In some embodiments, “cycloaliphatic” (or “carbocycle” or “cycloalkyl”) refers to a monocyclic C₃-C₁₀, or C₃-C₆ hydrocarbon, or a C₄-C₁₀, or C₈-C₁₀ bicyclic hydrocarbon that is completely saturated or that contains one or more units of unsaturation, but which is not aromatic, or a C₉-C₁₆ tricyclic hydrocarbon that is completely saturated or that contains one or more units of unsaturation, but which is not aromatic.

[0103] Derivative: As used herein, the term “derivative” refers to a structural analogue of a reference substance. That is, a “derivative” is a substance that shows significant structural similarity with the reference substance, for example sharing a core or consensus structure, but also differs in certain discrete ways. In some embodiments, a derivative is a substance that can be generated from the reference substance by chemical manipulation. In some embodiments, a derivative is a substance that can be generated through performance of a synthetic process substantially similar to (e.g., sharing a plurality of steps with) one that generates the reference substance.

[0104] Dosage form or unit dosage form: Those skilled in the art will appreciate that the term “dosage form” may be used to refer to a physically discrete unit of an active agent (e.g., a therapeutic or diagnostic agent) for administration to a subject. Typically, each such unit contains a predetermined quantity of active agent. In some embodiments, such quantity is a unit dosage amount (or a whole fraction thereof) appropriate for administration in accordance with a dosing regimen that has been determined to correlate with a desired or beneficial outcome when administered to a relevant population (i.e., with a therapeutic dosing regimen). Those of ordinary skill in the art appreciate that the total amount of a therapeutic composition or agent administered to a particular subject is determined by one or more attending physicians and may involve administration of multiple dosage forms.

[0105] Dosing regimen: Those skilled in the art will appreciate that the term “dosing regimen” may be used to refer to a set of unit doses (typically more than one) that are administered individually to a subject, typically separated by periods of time. In some embodiments, a given therapeutic agent has a recommended dosing regimen, which may involve one or more doses. In some embodiments, a dosing regimen comprises a plurality of doses each of which is separated in time from other doses. In some embodiments, individual doses are separated from one another by a time period of the same length; in some embodiments, a dosing regimen comprises a plurality of doses and at least two different time periods separating individual doses. In some embodiments, all doses within a dosing regimen are of the same unit dose amount. In some embodiments, different doses within a dosing regimen are of different amounts. In some embodiments, a dosing regimen comprises a first dose in a first dose amount, followed by one or more additional doses in a second dose amount different from the first dose amount. In some embodiments, a dosing regimen comprises a first dose in a first dose amount, followed by one or more additional doses in a second dose amount same as the first dose amount. In some embodiments, a dosing regimen is correlated with a desired or beneficial outcome when administered across a relevant population (i.e., is a therapeutic dosing regimen).

[0106] Engineered: In general, the term “engineered” refers to the aspect of having been manipulated by the hand of man. For example, in some embodiments, a peptide may be considered to be engineered if its amino acid sequence has been selected by man. For example, an engineered agent has an amino acid sequence that was selected based on preferences for corresponding amino acids at particular sites of protein-protein interactions. In some embodiments, an engineered sequence has an amino acid sequence that differs from the amino acid sequence of polypeptides included in the NCBI database that binds to a TCF site of beta-catenin. In many embodiments, provided agents are engineered agents. In some embodiments, engineered agents are peptide agents comprising non-natural amino acid residues, non-natural amino acid sequences, and/or peptide staples. In some embodiments, provided agents comprise or are engineered peptide agents which comprise engineered sequences.

[0107] Halogen: The term “halogen” means F, Cl, Br, or I.

[0108] Heteroaliphatic: The term “heteroaliphatic” is given its ordinary meaning in the art and refers to aliphatic groups as described herein in which one or more carbon atoms are replaced with one or more heteroatoms (e.g., oxygen, nitrogen, sulfur, silicon, phosphorus, and the like).

[0109] Heteroalkyl: The term “heteroalkyl” is given its ordinary meaning in the art and refers to alkyl groups as described herein in which one or more carbon atoms is replaced with a heteroatom (e.g., oxygen, nitrogen, sulfur, silicon, phosphorus, and the like). Examples of heteroalkyl groups include, but are not limited to, alkoxy, poly(ethylene glycol)-, alkyl-substituted amino, tetrahydrofuranyl, piperidinyl, morpholinyl, etc.

[0110] Heteroaryl: The terms “heteroaryl” and “heteroar-,” used alone or as part of a larger moiety, e.g., “heteroaralkyl,” or “heteroaralkoxy,” refer to monocyclic, bicyclic or polycyclic ring systems having, for example, a total of five to thirty, e.g., 5, 6, 9, 10, 14, etc., ring members, wherein at least one ring in the system is aromatic and at least one aromatic ring atom is a heteroatom. In some embodiments, a heteroatom is nitrogen, oxygen or sulfur. In some embodiments, a heteroaryl group is a group having 5 to 10 ring atoms (i.e., monocyclic, bicyclic or polycyclic), in some embodiments 5, 6, 9, or 10 ring atoms. In some embodiments, a heteroaryl group has 6, 10, or 14 π electrons shared in a cyclic array; and having, in addition to carbon atoms, from one to five heteroatoms. Heteroaryl groups include, without limitation, thienyl, furanyl, pyrrolyl, imidazolyl, pyrazolyl, triazolyl, tetrazolyl, oxazolyl, isoxazolyl, oxadiazolyl, thiazolyl, isothiazolyl, thiadiazolyl, pyridyl, pyridazinyl, pyrimidinyl, pyrazinyl, indolizinyl, purinyl, naphthyridinyl, and pteridinyl. In some embodiments, a heteroaryl is a heterobiaryl group, such as bipyridyl and the like. The terms “heteroaryl” and “heteroar-”, as used herein, also include groups in which a heteroaromatic ring is fused to one or more aryl, cycloaliphatic, or heterocyclyl rings, where a radical or point of attachment is on a heteroaromatic ring. Non-limiting examples include indolyl, isoindolyl, benzothienyl, benzofuranyl, dibenzofuranyl, indazolyl, benzimidazolyl, benzthiazolyl, quinolyl, isoquinolyl, cinnolinyl, phthalazinyl, quinazolinyl, quinoxalinyl, 4H-quinolizinyl, carbazolyl, acridinyl, phenazinyl, phenothiazinyl, phenoxazinyl, tetrahydroquinolinyl, tetrahydroisoquinolinyl, and pyrido[2,3-b]-1,4-oxazin-3 (4H)-one. A heteroaryl group may be monocyclic, bicyclic or polycyclic. The term “heteroaryl” may be used interchangeably with the terms “heteroaryl ring,” “heteroaryl group,” or “heteroaromatic,” any of which terms include rings that are optionally substituted. The term “heteroaralkyl” refers to an alkyl group substituted by a heteroaryl group, wherein the alkyl and heteroaryl portions independently are optionally substituted.

[0111] Heteroatom: The term “heteroatom” means an atom that is not carbon and is not hydrogen. In some embodiments, a heteroatom is oxygen, sulfur, nitrogen, phosphorus, boron or silicon (including any oxidized form of nitrogen, sulfur, phosphorus, or silicon; the quaternized form of any basic nitrogen or a substitutable nitrogen of a heterocyclic ring (for example, N as in 3,4-dihydro-2H-pyrrolyl), NH (as in pyrrolidinyl) or NR⁺ (as in N-substituted pyrrolidinyl); etc.). In some embodiments, a heteroatom is boron, nitrogen, oxygen, silicon, sulfur, or phosphorus. In some embodiments, a heteroatom is nitrogen, oxygen, silicon, sulfur, or phosphorus. In some embodiments, a heteroatom is nitrogen, oxygen, sulfur, or phosphorus. In some embodiments, a heteroatom is nitrogen, oxygen or sulfur.

[0112] Heterocyclyl: As used herein, the terms “heterocycle,” “heterocyclyl,” “heterocyclic radical,” and “heterocyclic ring” are used interchangeably and refer to a monocyclic, bicyclic or polycyclic ring moiety (e.g., 3-30 membered) that is saturated or partially unsaturated and has one or more heteroatom ring atoms. In some embodiments, a heteroatom is boron, nitrogen, oxygen, silicon, sulfur, or phosphorus. In some embodiments, a heteroatom is nitrogen, oxygen, silicon, sulfur, or phosphorus. In some embodiments, a heteroatom is nitrogen, oxygen, sulfur, or phosphorus. In some embodiments, a heteroatom is nitrogen, oxygen or sulfur. In some embodiments, a heterocyclyl group is a stable 5- to 7-membered monocyclic or 7- to 10-membered bicyclic heterocyclic moiety that is either saturated or partially unsaturated, and having, in addition to carbon atoms, one or more, preferably one to four, heteroatoms, as defined above. When used in reference to a ring atom of a heterocycle, the term “nitrogen” includes substituted nitrogen. As an example, in a saturated or partially unsaturated ring having 0-3 heteroatoms selected from oxygen, sulfur or nitrogen, the nitrogen may be N (as in 3,4-dihydro-2H-pyrrolyl), NH (as in pyrrolidinyl), or +NR (as in N-substituted pyrrolidinyl). A heterocyclic ring can be attached to its pendant group at any heteroatom or carbon atom that results in a stable structure and any of the ring atoms can be optionally substituted. Examples of such saturated or partially unsaturated heterocyclic radicals include, without limitation, tetrahydrofuranyl, tetrahydrothienyl, pyrrolidinyl, piperidinyl, pyrrolinyl, tetrahydroquinolinyl, tetrahydroisoquinolinyl, decahydroquinolinyl, oxazolidinyl, piperazinyl, dioxanyl, dioxolanyl, diazepinyl, oxazepinyl, thiazepinyl, morpholinyl, and quinuclidinyl. The terms “heterocycle,” “heterocyclyl,” “heterocyclyl ring,” “heterocyclic group,” “heterocyclic moiety,” and “heterocyclic radical,” are used interchangeably herein, and also include groups in which a heterocyclyl ring is fused to one or more aryl, heteroaryl, or cycloaliphatic rings, such as indolinyl, 3H-indolyl, chromanyl, phenanthridinyl, or tetrahydroquinolinyl, where a radical or point of attachment is on a heteroaliphatic ring. A heterocyclyl group may be monocyclic, bicyclic or polycyclic. The term “heterocyclylalkyl” refers to an alkyl group substituted by a heterocyclyl, wherein the alkyl and heterocyclyl portions independently are optionally substituted.

[0113] Homology: As used herein, the term “homology” refers to the overall relatedness between polymeric molecules, e.g., between nucleic acid molecules (e.g., DNA molecules and/or RNA molecules) and/or between polypeptide molecules. In some embodiments, polymeric molecules are considered to be “homologous” to one another if their sequences are at least 25%, 30%, 35%, 40%, 45%, 50%, 55%, 60%, 65%, 70%, 75%, 80%, 85%, 90%, 95%, or 99% identical. In some embodiments, polymeric molecules are considered to be “homologous” to one another if their sequences are at least 25%, 30%, 35%, 40%, 45%, 50%, 55%, 60%, 65%, 70%, 75%, 80%, 85%, 90%, 95%, or 99% similar (e.g., containing residues with related chemical properties at corresponding positions). For example, as is well known by those of ordinary skill in the art, certain amino acids are typically classified as similar to one another as “hydrophobic” or “hydrophilic” amino acids, and/or as having “polar” or “non-polar” side chains. Substitution of one amino acid for another of the same type may often be considered a “homologous” substitution. Typical amino acid categorizations are summarized below (hydrophobicity scale of Kyte and Doolittle, 1982: A simple method for displaying the hydropathic character of a protein. J. Mol. Biol. 157:105-132):

| | | | | Side | Hydropathy |
|---|---|---|---|---|---|
| | | | Side | Chain | Index of |
| | 3 Letter | 1 Letter | Chain | Acidity/ | Kyte and |
| Amino Acid | Code | Code | Polarity | Basicity | Doolittle |
| Alanine | Ala | A | nonpolar | neutral | 1.8 |
| Arginine | Arg | R | polar | basic | −4.5 |
| Asparagine | Asn | N | polar | neutral | −3.5 |
| Aspartic acid | Asp | D | polar | acidic | −3.5 |
| Cysteine | Cys | C | nonpolar | neutral | 2.5 |
| Glutamic acid | Glu | E | polar | acidic | −3.5 |
| Glutamine | Gln | Q | polar | neutral | −3.5 |
| Glycine | Gly | G | nonpolar | neutral | −0.4 |
| Histidine | His | H | polar | basic | −3.2 |
| Isoleucine | Ile | I | nonpolar | neutral | 4.5 |
| Leucine | Leu | L | nonpolar | neutral | 3.8 |
| Lysine | Lys | K | polar | basic | −3.9 |
| Methionine | Met | M | nonpolar | neutral | 1.9 |
| Phenylalanine | Phe | F | nonpolar | neutral | 2.8 |
| Proline | Pro | P | nonpolar | neutral | −1.6 |
| Serine | Ser | S | polar | neutral | −0.8 |
| Threonine | Thr | T | polar | neutral | −0.7 |
| Tryptophan | Trp | W | nonpolar | neutral | −0.9 |
| Tyrosine | Tyr | Y | polar | neutral | −1.3 |
| Valine | Val | V | nonpolar | neutral | 4.2 |

| Ambiguous Amino Acids | 3-Letter | 1-Letter |
|---|---|---|
| Asparagine or aspartic acid | Asx | B |
| Glutamine or glutamic acid | Glx | Z |
| Leucine or Isoleucine | Xle | J |
| Unspecified or unknown amino acid | Xaa | X |

[0114] As will be understood by those skilled in the art, a variety of algorithms are available that permit comparison of sequences in order to determine their degree of homology, including by permitting gaps of designated length in one sequence relative to another when considering which residues “correspond” to one another in different sequences. Calculation of the percent homology between two nucleic acid sequences, for example, can be performed by aligning the two sequences for optimal comparison purposes (e.g., gaps can be introduced in one or both of a first and a second nucleic acid sequences for optimal alignment and non-corresponding sequences can be disregarded for comparison purposes). In certain embodiments, the length of a sequence aligned for comparison purposes is at least 30%, at least 40%, at least 50%, at least 60%, at least 70%, at least 80%, at least 90%, at least 95%, or substantially 100% of the length of the reference sequence. The nucleotides at corresponding nucleotide positions are then compared. When a position in the first sequence is occupied by the same nucleotide as the corresponding position in the second sequence, then the molecules are identical at that position; when a position in the first sequence is occupied by a similar nucleotide as the corresponding position in the second sequence, then the molecules are similar at that position. The percent homology between the two sequences is a function of the number of identical and similar positions shared by the sequences, taking into account the number of gaps, and the length of each gap, which needs to be introduced for optimal alignment of the two sequences. Representative algorithms and computer programs useful in determining the percent homology between two nucleotide sequences include, for example, the algorithm of Meyers and Miller (CABIOS, 1989, 4:11-17), which has been incorporated into the ALIGN program (version 2.0) using a PAM120 weight residue table, a gap length penalty of 12 and a gap penalty of 4. The percent homology between two nucleotide sequences can, alternatively, be determined for example using the GAP program in the GCG software package using an NWSgapdna.CMP matrix.

[0115] Interaction residues: The term “interaction residues”, “interaction motifs”, as used herein, refers to, with respect to an agent, residues or motifs in an agent that are designed to interact with particular target residues in a target polypeptide, or with respect to a target polypeptide, residues in a target polypeptide that interact with particular motifs (e.g., aromatic groups, amino acid residues, etc.) of an agent. Specifically, interaction residues and motifs of various agents are selected and arranged within the agents so that they will be displayed in three dimensional space within a predetermined distance (or volume) of identified target residues (e.g., upon binding, docking or other interaction assays). In many embodiments, interaction residues are direct-binding residues.

[0116] “Improved,” “increased”′ or “reduced”: As used herein, these terms, or grammatically comparable comparative terms, indicate values that are relative to a comparable reference measurement. For example, in some embodiments, an assessed value achieved with an agent of interest may be “improved” relative to that obtained with a comparable reference agent. Alternatively or additionally, in some embodiments, an assessed value achieved in a subject or system of interest may be “improved” relative to that obtained in the same subject or system under different conditions (e.g., prior to or after an event such as administration of an agent of interest), or in a different, comparable subject (e.g., in a comparable subject or system that differs from the subject or system of interest in presence of one or more indicators of a particular disease, disorder or condition of interest, or in prior exposure to a condition or agent, etc). In some embodiments, comparative terms refer to statistically relevant differences (e.g., that are of a prevalence and/or magnitude sufficient to achieve statistical relevance). Those skilled in the art will be aware, or will readily be able to determine, in a given context, a degree and/or prevalence of difference that is required or sufficient to achieve such statistical significance.

[0117] Partially unsaturated: As used herein, the term “partially unsaturated” refers to a moiety that includes at least one double or triple bond. The term “partially unsaturated” is intended to encompass groups having multiple sites of unsaturation, but is not intended to include aryl or heteroaryl moieties.

[0118] Peptide: The term “peptide” as used herein refers to a polypeptide. In some embodiments, a peptide is a polypeptide that is relatively short, for example having a length of less than about 100 amino acids, less than about 50 amino acids, less than about 40 amino acids less than about 30 amino acids, less than about 25 amino acids, less than about 20 amino acids, less than about 15 amino acids, or less than 10 amino acids. In some embodiments, a length is about 5-20, 5-19, 5-18, 5-17, 5-16, 5-15, 10-20, 10-19, 10-18, 10-17, 10-16, 10-15, 11-20, 11-19, 11-18, 11-17, 11-16, 11-15, 12-20, 12-19, 12-18, 12-17, 12-16, 12-15, 13-20, 13-19, 13-18, 13-17, 13-16, 13-15, 14-20, 14-19, 14-18, 14-17, 14-16, 14-15, or about 2, 3, 4, 5, 6, 7, 8, 9, 10, 11, 12, 13, 14, 15, 16, 17, 18, 19, or 20 amino acids.

[0119] Pharmaceutical composition: As used herein, the term “pharmaceutical composition” refers to an active agent, formulated together with one or more pharmaceutically acceptable carriers. In some embodiments, active agent is present in unit dose amount appropriate for administration in a therapeutic regimen that shows a statistically significant probability of achieving a predetermined therapeutic effect when administered to a relevant population. In some embodiments, pharmaceutical compositions may be specially formulated for administration in solid or liquid form, including those adapted for the following: oral administration, for example, drenches (aqueous or non-aqueous solutions or suspensions), tablets, e.g., those targeted for buccal, sublingual, and systemic absorption, boluses, powders, granules, pastes for application to the tongue; parenteral administration, for example, by subcutaneous, intramuscular, intravenous or epidural injection as, for example, a sterile solution or suspension, or sustained-release formulation; topical application, for example, as a cream, ointment, or a controlled-release patch or spray applied to the skin, lungs, or oral cavity; intravaginally or intrarectally, for example, as a pessary, cream, or foam; sublingually; ocularly; transdermally; or nasally, pulmonary, and to other mucosal surfaces.

[0120] Pharmaceutically acceptable: As used herein, the phrase “pharmaceutically acceptable” refers to those compounds, materials, compositions, and/or dosage forms which are, within the scope of sound medical judgment, suitable for use in contact with the tissues of human beings and animals without excessive toxicity, irritation, allergic response, or other problem or complication, commensurate with a reasonable benefit/risk ratio.

[0121] Pharmaceutically acceptable carrier: As used herein, the term “pharmaceutically acceptable carrier” means a pharmaceutically-acceptable material, composition or vehicle, such as a liquid or solid filler, diluent, excipient, or solvent encapsulating material, involved in carrying or transporting the subject compound from one organ, or portion of the body, to another organ, or portion of the body. Each carrier must be “acceptable” in the sense of being compatible with the other ingredients of the formulation and not injurious to the patient. Some examples of materials which can serve as pharmaceutically-acceptable carriers include: sugars, such as lactose, glucose and sucrose; starches, such as corn starch and potato starch; cellulose, and its derivatives, such as sodium carboxymethyl cellulose, ethyl cellulose and cellulose acetate; powdered tragacanth; malt; gelatin; talc; excipients, such as cocoa butter and suppository waxes; oils, such as peanut oil, cottonseed oil, safflower oil, sesame oil, olive oil, corn oil and soybean oil; glycols, such as propylene glycol; polyols, such as glycerin, sorbitol, mannitol and polyethylene glycol; esters, such as ethyl oleate and ethyl laurate; agar; buffering agents, such as magnesium hydroxide and aluminum hydroxide; alginic acid; pyrogen-free water; isotonic saline; RingeR's solution; ethyl alcohol; pH buffered solutions; polyesters, polycarbonates and/or polyanhydrides; and other non-toxic compatible substances employed in pharmaceutical formulations.

[0122] Pharmaceutically acceptable salt: The term “pharmaceutically acceptable salt”, as used herein, refers to salts of such compounds that are appropriate for use in pharmaceutical contexts, i.e., salts which are, within the scope of sound medical judgment, suitable for use in contact with the tissues of humans and lower animals without undue toxicity, irritation, allergic response and the like, and are commensurate with a reasonable benefit/risk ratio. Pharmaceutically acceptable salts are well known. For example, S. M. Berge, et al. describes pharmaceutically acceptable salts in detail in J. Pharmaceutical Sciences, 66:1-19 (1977). In some embodiments, pharmaceutically acceptable salts include, but are not limited to, nontoxic acid addition salts, which are salts of an amino group formed with inorganic acids such as hydrochloric acid, hydrobromic acid, phosphoric acid, sulfuric acid and perchloric acid or with organic acids such as acetic acid, maleic acid, tartaric acid, citric acid, succinic acid or malonic acid or by using other known methods such as ion exchange. In some embodiments, pharmaceutically acceptable salts include, but are not limited to, adipate, alginate, ascorbate, aspartate, benzenesulfonate, benzoate, bisulfate, borate, butyrate, camphorate, camphorsulfonate, citrate, cyclopentanepropionate, digluconate, dodecylsulfate, ethanesulfonate, formate, fumarate, glucoheptonate, glycerophosphate, gluconate, hemisulfate, heptanoate, hexanoate, hydroiodide, 2-hydroxy-ethanesulfonate, lactobionate, lactate, laurate, lauryl sulfate, malate, maleate, malonate, methanesulfonate, 2-naphthalenesulfonate, nicotinate, nitrate, oleate, oxalate, palmitate, pamoate, pectinate, persulfate, 3-phenylpropionate, phosphate, picrate, pivalate, propionate, stearate, succinate, sulfate, tartrate, thiocyanate, p-toluenesulfonate, undecanoate, valerate salts, and the like. In some embodiments, pharmaceutically acceptable salts include, but are not limited to, nontoxic base addition salts, such as those formed by acidic groups of provided compounds with bases. Representative alkali or alkaline earth metal salts include salts of sodium, lithium, potassium, calcium, magnesium, and the like. In some embodiments, pharmaceutically acceptable salts are ammonium salts (e.g., —N(R)₃⁺). In some embodiments, pharmaceutically acceptable salts are sodium salts. In some embodiments, pharmaceutically acceptable salts include, when appropriate, nontoxic ammonium, quaternary ammonium, and amine cations formed using counterions such as halide, hydroxide, carboxylate, sulfate, phosphate, nitrate, alkyl having from 1 to 6 carbon atoms, sulfonate and aryl sulfonate.

[0123] Polypeptide: As used herein refers to any polymeric chain of amino acids. In some embodiments, a polypeptide has an amino acid sequence that occurs in nature. In some embodiments, a polypeptide has an amino acid sequence that does not occur in nature. In some embodiments, a polypeptide has an amino acid sequence that is engineered in that it is designed and/or produced through action of the hand of man. In some embodiments, a polypeptide may comprise or consist of natural amino acids, non-natural amino acids, or both. In some embodiments, a polypeptide may comprise or consist of only natural amino acids or only non-natural amino acids. In some embodiments, a polypeptide may comprise D-amino acids, L-amino acids, or both. In some embodiments, a polypeptide may comprise only D-amino acids. In some embodiments, a polypeptide may comprise only L-amino acids. In some embodiments, a polypeptide may include one or more pendant groups or other modifications, e.g., modifying or attached to one or more amino acid side chains, at the polypeptide's N-terminus, at the polypeptide's C-terminus, or any combination thereof. In some embodiments, such pendant groups or modifications may be selected from the group consisting of acetylation, amidation, lipidation, methylation, pegylation, etc., including combinations thereof. In some embodiments, a polypeptide may be cyclic, and/or may comprise a cyclic portion. In some embodiments, a polypeptide is not cyclic and/or does not comprise any cyclic portion. In some embodiments, a polypeptide is linear. In some embodiments, a polypeptide may be or comprise a stapled polypeptide. In some embodiments, the term “polypeptide” may be appended to a name of a reference polypeptide, activity, or structure; in such instances it is used herein to refer to polypeptides that share the relevant activity or structure and thus can be considered to be members of the same class or family of polypeptides. For each such class, the present specification provides and/or those skilled in the art will be aware of exemplary polypeptides within the class whose amino acid sequences and/or functions are known; in some embodiments, such exemplary polypeptides are reference polypeptides for the polypeptide class or family. In some embodiments, a member of a polypeptide class or family shows significant sequence homology or identity with, shares a common sequence motif (e.g., a characteristic sequence element) with, and/or shares a common activity (in some embodiments at a comparable level or within a designated range) with a reference polypeptide of the class; in some embodiments with all polypeptides within the class). For example, in some embodiments, a member polypeptide shows an overall degree of sequence homology or identity with a reference polypeptide that is at least about 30-40%, and is often greater than about 50%, 60%, 70%, 80%, 90%, 91%, 92%, 93%, 94%, 95%, 96%, 97%, 98%, 99% or more and/or includes at least one region (e.g., a conserved region that may in some embodiments be or comprise a characteristic sequence element) that shows very high sequence identity, often greater than 90% or even 95%, 96%, 97%, 98%, or 99%. Such a conserved region usually encompasses at least 3-4 and often up to 20 or more amino acids; in some embodiments, a conserved region encompasses at least one stretch of at least 2, 3, 4, 5, 6, 7, 8, 9, 10, 11, 12, 13, 14, 15 or more contiguous amino acids. In some embodiments, a relevant polypeptide may comprise or consist of a fragment of a parent polypeptide. In some embodiments, a useful polypeptide as may comprise or consist of a plurality of fragments, each of which is found in the same parent polypeptide in a different spatial arrangement relative to one another than is found in the polypeptide of interest (e.g., fragments that are directly linked in the parent may be spatially separated in the polypeptide of interest or vice versa, and/or fragments may be present in a different order in the polypeptide of interest than in the parent), so that the polypeptide of interest is a derivative of its parent polypeptide.

[0124] Prevent or prevention: as used herein when used in connection with the occurrence of a disease, disorder, and/or condition, refers to reducing the risk of developing the disease, disorder and/or condition and/or to delaying onset of one or more characteristics or symptoms of the disease, disorder or condition. Prevention may be considered complete when onset of a disease, disorder or condition has been delayed for a predefined period of time.

[0125] Protecting group: The term “protecting group,” as used herein, is well known in the art and includes those described in detail in Protecting Groups in Organic Synthesis, T. W. Greene and P. G. M. Wuts, 3rd edition, John Wiley & Sons, 1999, the entirety of which is incorporated herein by reference. Also included are those protecting groups specially adapted for nucleoside and nucleotide chemistry described in Current Protocols in Nucleic Acid Chemistry, edited by Serge L. Beaucage et al. 06/2012, the entirety of Chapter 2 is incorporated herein by reference. Suitable amino-protecting groups include methyl carbamate, ethyl carbamante, 9-fluorenylmethyl carbamate (Fmoc), 9-(2-sulfo) fluorenylmethyl carbamate, 9-(2,7-dibromo) fluoroenylmethyl carbamate, 2,7-di-t-butyl-[9-(10,10-dioxo-10,10,10,10-tetrahydrothioxanthyl)]methyl carbamate (DBD-Tmoc), 4-methoxyphenacyl carbamate (Phenoc), 2,2,2-trichloroethyl carbamate (Troc), 2-trimethylsilylethyl carbamate (Teoc), 2-phenylethyl carbamate (hZ), 1-(1-adamantyl)-1-methylethyl carbamate (Adpoc), 1,1-dimethyl-2-haloethyl carbamate, 1,1-dimethyl-2,2-dibromocthyl carbamate (DB-t-BOC), 1,1-dimethyl-2,2,2-trichlorocthyl carbamate (TCBOC), 1-methyl-1-(4-biphenylyl)ethyl carbamate (Bpoc), 1-(3,5-di-t-butylphenyl)-1-methylethyl carbamate (t-Bumeoc), 2-(2′- and 4′-pyridyl)ethyl carbamate (Pyoc), 2-(N,N-dicyclohexylcarboxamido)ethyl carbamate, t-butyl carbamate (BOC), 1-adamantyl carbamate (Adoc), vinyl carbamate (Voc), allyl carbamate (Alloc), 1-isopropylallyl carbamate (Ipaoc), cinnamyl carbamate (Coc), 4-nitrocinnamyl carbamate (Noc), 8-quinolyl carbamate, N-hydroxypiperidinyl carbamate, alkyldithio carbamate, benzyl carbamate (Cbz), p-methoxybenzyl carbamate (Moz), p-nitobenzyl carbamate, p-bromobenzyl carbamate, p-chlorobenzyl carbamate, 2,4-dichlorobenzyl carbamate, 4-methylsulfinylbenzyl carbamate (Msz), 9-anthrylmethyl carbamate, diphenylmethyl carbamate, 2-methylthioethyl carbamate, 2-methylsulfonylethyl carbamate, 2-(p-toluenesulfonyl)ethyl carbamate, [2-(1,3-dithianyl)]methyl carbamate (Dmoc), 4-methylthiophenyl carbamate (Mtpc), 2,4-dimethylthiophenyl carbamate (Bmpc), 2-phosphonioethyl carbamate (Peoc), 2-triphenylphosphonioisopropyl carbamate (Ppoc), 1,1-dimethyl-2-cyanoethyl carbamate, m-chloro-p-acyloxybenzyl carbamate, p-(dihydroxyboryl)benzyl carbamate, 5-benzisoxazolylmethyl carbamate, 2-(trifluoromethyl)-6-chromonylmethyl carbamate (Tcroc), m-nitrophenyl carbamate, 3,5-dimethoxybenzyl carbamate, o-nitrobenzyl carbamate, 3,4-dimethoxy-6-nitrobenzyl carbamate, phenyl(o-nitrophenyl)methyl carbamate, phenothiazinyl-(10)-carbonyl derivative, N′-p-toluenesulfonylaminocarbonyl derivative, N′-phenylaminothiocarbonyl derivative, t-amyl carbamate, S-benzyl thiocarbamate, p-cyanobenzyl carbamate, cyclobutyl carbamate, cyclohexyl carbamate, cyclopentyl carbamate, cyclopropylmethyl carbamate, p-decyloxybenzyl carbamate, 2,2-dimethoxycarbonylvinyl carbamate, o-(N,N-dimethylcarboxamido)benzyl carbamate, 1,1-dimethyl-3-(N,N-dimethylcarboxamido)propyl carbamate, 1,1-dimethylpropynyl carbamate, di(2-pyridyl)methyl carbamate, 2-furanylmethyl carbamate, 2-iodoethyl carbamate, isoborynl carbamate, isobutyl carbamate, isonicotinyl carbamate, p-(p′-methoxyphenylazo)benzyl carbamate, 1-methylcyclobutyl carbamate, 1-methylcyclohexyl carbamate, 1-methyl-1-cyclopropylmethyl carbamate, 1-methyl-1-(3,5-dimethoxyphenyl)ethyl carbamate, 1-methyl-1-(p-phenylazophenyl)ethyl carbamate, 1-methyl-1-phenylethyl carbamate, 1-methyl-1-(4-pyridyl)ethyl carbamate, phenyl carbamate, p-(phenylazo)benzyl carbamate, 2,4,6-tri-t-butylphenyl carbamate, 4-(trimethylammonium)benzyl carbamate, 2,4,6-trimethylbenzyl carbamate, formamide, acetamide, chloroacetamide, trichloroacetamide, trifluoroacetamide, phenylacetamide, 3-phenylpropanamide, picolinamide, 3-pyridylcarboxamide, N-benzoylphenylalanyl derivative, benzamide, p-phenylbenzamide, o-nitophenylacetamide, o-nitrophenoxyacetamide, acetoacetamide, (N′-dithiobenzyloxycarbonylamino) acetamide, 3-(p-hydroxyphenyl) propanamide, 3-(0-nitrophenyl) propanamide, 2-methyl-2-(o-nitrophenoxy) propanamide, 2-methyl-2-(0-phenylazophenoxy) propanamide, 4-chlorobutanamide, 3-methyl-3-nitrobutanamide, o-nitrocinnamide, N-acetylmethionine derivative, o-nitrobenzamide, o-(benzoyloxymethyl)benzamide, 4,5-diphenyl-3-oxazolin-2-one, N-phthalimide, N-dithiasuccinimide (Dts), N-2,3-diphenylmaleimide, N-2,5-dimethylpyrrole, N-1,1,4,4-tetramethyldisilylazacyclopentane adduct (STABASE), 5-substituted 1,3-dimethyl-1,3,5-triazacyclohexan-2-one, 5-substituted 1,3-dibenzyl-1,3,5-triazacyclohexan-2-one, 1-substituted 3,5-dinitro-4-pyridonc, N-mcthylamine, N-allylamine, N-[2-(trimethylsilyl) ethoxy]methylamine (SEM), N-3-acetoxypropylamine, N-(1-isopropyl-4-nitro-2-oxo-3-pyroolin-3-yl)amine, quaternary ammonium salts, N-benzylamine, N-di(4-methoxyphenyl)methylamine, N-5-dibenzosuberylamine, N-triphenylmethylamine (Tr), N-[(4-methoxyphenyl)diphenylmethyl]amine (MMTr), N-9-phenylfluorenylamine (PhF), N-2,7-dichloro-9-fluorenylmethyleneamine, N-ferrocenylmethylamino (Fcm), N-2-picolylamino N′-oxide, N-1,1-dimethylthiomethyleneamine, N-benzylideneamine, N-p-methoxybenzylideneamine, N-diphenylmethyleneamine, N-[(2-pyridyl) mesityl]methyleneamine, N-(N′,N′-dimethylaminomethylene)amine, N,N′-isopropylidenediamine, N-p-nitrobenzylideneamine, N-salicylideneamine, N-5-chlorosalicylideneamine, N-(5-chloro-2-hydroxyphenyl)phenylmethyleneamine, N-cyclohexylideneamine, N-(5,5-dimethyl-3-oxo-1-cyclohexenyl)amine, N-borane derivative, N-diphenylborinic acid derivative, N-[phenyl(pentacarbonylchromium- or tungsten) carbonyl]amine, N-copper chelate, N-zinc chelate, N-nitroamine, N-nitrosoamine, amine N-oxide, diphenylphosphinamide (Dpp), dimethylthiophosphinamide (Mpt), diphenylthiophosphinamide (Ppt), dialkyl phosphoramidates, dibenzyl phosphoramidate, diphenyl phosphoramidate, benzenesulfenamide, o-nitrobenzenesulfenamide (Nps), 2,4-dinitrobenzenesulfenamide, pentachlorobenzenesulfenamide, 2-nitro-4-methoxybenzenesulfenamide, triphenylmethylsulfenamide, 3-nitropyridinesulfenamide (Npys), p-toluenesulfonamide (Ts), benzenesulfonamide, 2,3,6, -trimethyl-4-methoxybenzenesulfonamide (Mtr), 2,4,6-trimethoxybenzenesulfonamide (Mtb), 2,6-dimethyl-4-methoxybenzenesulfonamide (Pme), 2,3,5,6-tetramethyl-4-methoxybenzenesulfonamide (Mte), 4-methoxybenzenesulfonamide (Mbs), 2,4,6-trimethylbenzenesulfonamide (Mts), 2,6-dimethoxy-4-methylbenzenesulfonamide (iMds), 2,2,5,7,8-pentamethylchroman-6-sulfonamide (Pmc), methanesulfonamide (Ms), β-trimethylsilylethanesulfonamide (SES), 9-anthracenesulfonamide, 4-(4′,8′-dimethoxynaphthylmethyl)benzenesulfonamide (DNMBS), benzylsulfonamide, trifluoromethylsulfonamide, and phenacylsulfonamide.

[0126] In some embodiments, suitable mono-protected amines include, but are not limited to, aralkylamines, carbamates, allyl amines, amides, and the like. Examples of suitable mono-protected amino moieties include t-butyloxycarbonylamino (—NHBOC), ethyloxycarbonylamino, methyloxycarbonylamino, trichloroethyloxycarbonylamino, allyloxycarbonylamino (—NHAlloc), benzyloxocarbonylamino (—NHCBZ), allylamino, benzylamino (—NHBn), fluorenylmethylcarbonyl (—NHFmoc), formamido, acetamido, chloroacetamido, dichloroacetamido, trichloroacetamido, phenylacetamido, trifluoroacetamido, benzamido, t-butyldiphenylsilyl, and the like. In some embodiments, suitable di-protected amines include amines that are substituted with two substituents independently selected from those described above as mono-protected amines, and further include cyclic imides, such as phthalimide, maleimide, succinimide, and the like. In some embodiments, suitable di-protected amines include pyrroles and the like, 2,2,5,5-tetramethyl-[1,2,5]azadisilolidine and the like, and azide.

[0127] Suitably protected carboxylic acids further include, but are not limited to, silyl-, alkyl-, alkenyl-, aryl-, and arylalkyl-protected carboxylic acids. Examples of suitable silyl groups include trimethylsilyl, tricthylsilyl, t-butyldimethylsilyl, t-butyldiphenylsilyl, triisopropylsilyl, and the like. Examples of suitable alkyl groups include methyl, benzyl, p-methoxybenzyl, 3,4-dimethoxybenzyl, trityl, t-butyl, tetrahydropyran-2-yl. Examples of suitable alkenyl groups include allyl. Examples of suitable aryl groups include optionally substituted phenyl, biphenyl, or naphthyl. Examples of suitable arylalkyl groups include optionally substituted benzyl (e.g., p-methoxybenzyl (MPM), 3,4-dimethoxybenzyl, O-nitrobenzyl, p-nitrobenzyl, p-halobenzyl, 2,6-dichlorobenzyl, p-cyanobenzyl), and 2— and 4-picolyl. In some embodiments, suitable protected carboxylic acids include, but are not limited to, optionally substituted C₁₋₆ aliphatic esters, optionally substituted aryl esters, silyl esters, activated esters, amides, hydrazides, and the like. Examples of such ester groups include methyl, ethyl, propyl, isopropyl, butyl, isobutyl, benzyl, and phenyl ester, wherein each group is optionally substituted. Additional suitable protected carboxylic acids include oxazolines and ortho esters.

[0128] Suitable hydroxyl protecting groups include methyl, methoxylmethyl (MOM), methylthiomethyl (MTM), t-butylthiomethyl, (phenyldimethylsilyl) methoxymethyl (SMOM), benzyloxymethyl (BOM), p-methoxybenzyloxymethyl (PMBM), (4-methoxyphenoxy) methyl(p-AOM), guaiacolmethyl (GUM), t-butoxymethyl, 4-pentenyloxymethyl (POM), siloxymethyl, 2-methoxyethoxymethyl (MEM), 2,2,2-trichloroethoxymethyl, bis(2-chloroethoxy)methyl, 2-(trimethylsilyl) ethoxymethyl (SEMOR), tetrahydropyranyl (THP), 3-bromotetrahydropyranyl, tetrahydrothiopyranyl, 1-methoxycyclohexyl, 4-methoxytetrahydropyranyl (MTHP), 4-methoxytetrahydrothiopyranyl, 4-methoxytetrahydrothiopyranyl S,S-dioxide, 1-[(2-chloro-4-methyl)phenyl]-4-methoxypiperidin-4-yl (CTMP), 1,4-dioxan-2-yl, tetrahydrofuranyl, tetrahydrothiofuranyl, 2,3,3a,4,5,6,7,7a-octahydro-7,8,8-trimethyl-4,7-methanobenzofuran-2-yl, 1-ethoxyethyl, 1-(2-chloroethoxy)ethyl, 1-methyl-1-methoxyethyl, 1-methyl-1-benzyloxyethyl, 1-methyl-1-benzyloxy-2-fluoroethyl, 2,2,2-trichloroethyl, 2-trimethylsilylethyl, 2-(phenylselenyl)ethyl, t-butyl, allyl, p-chlorophenyl, p-methoxyphenyl, 2,4-dinitrophenyl, benzyl, p-methoxybenzyl, 3,4-dimethoxybenzyl, o-nitrobenzyl, p-nitrobenzyl, p-halobenzyl, 2,6-dichlorobenzyl, p-cyanobenzyl, p-phenylbenzyl, 2-picolyl, 4-picolyl, 3-methyl-2-picolyl N-oxido, diphenylmethyl, p,p′-dinitrobenzhydryl, 5-dibenzosuberyl, triphenylmethyl, a-naphthyldiphenylmethyl, p-methoxyphenyldiphenylmethyl, di(p-methoxyphenyl)phenylmethyl, tri (p-methoxyphenyl)methyl, 4-(4′-bromophenacyloxyphenyl)diphenylmethyl, 4,4′,4″-tris(4,5-dichlorophthalimidophenyl)methyl, 4,4′,4″-tris(levulinoyloxyphenyl)methyl, 4,4′,4″-tris(benzoyloxyphenyl)methyl, 3-(imidazol-1-yl)bis(4′,4″-dimethoxyphenyl)methyl, 1,1-bis(4-methoxyphenyl)-1′-pyrenylmethyl, 9-anthryl, 9-(9-phenyl) xanthenyl, 9-(9-phenyl-10-oxo) anthryl, 1,3-benzodithiolan-2-yl, benzisothiazolyl S,S-dioxido, trimethylsilyl (TMS), triethylsilyl (TES), triisopropylsilyl (TIPS), dimethylisopropylsilyl (IPDMS), diethylisopropylsilyl (DEIPS), dimethylthexylsilyl, t-butyldimethylsilyl (TBDMS), t-butyldiphenylsilyl (TBDPS), tribenzylsilyl, tri-p-xylylsilyl, triphenylsilyl, diphenylmethylsilyl (DPMS), t-butylmethoxyphenylsilyl (TBMPS), formate, benzoylformate, acetate, chloroacetate, dichloroacetate, trichloroacetate, trifluoroacetate, methoxyacetate, triphenylmethoxyacetate, phenoxyacetate, p-chlorophenoxyacetate, 3-phenylpropionate, 4-oxopentanoate (levulinatc), 4,4-(cthylenedithio) pentanoate (levulinoyldithioacctal), pivaloate, adamantoate, crotonatc, 4-methoxycrotonate, benzoate, p-phenylbenzoate, 2,4,6-trimethylbenzoate (mesitoate), alkyl methyl carbonate, 9-fluorenylmethyl carbonate (Fmoc), alkyl ethyl carbonate, alkyl 2,2,2-trichloroethyl carbonate (Troc), 2-(trimethylsilyl)ethyl carbonate (TMSEC), 2-(phenylsulfonyl)ethyl carbonate (Psec), 2-(triphenylphosphonio)ethyl carbonate (Peoc), alkyl isobutyl carbonate, alkyl vinyl carbonate alkyl allyl carbonate, alkyl p-nitrophenyl carbonate, alkyl benzyl carbonate, alkyl p-methoxybenzyl carbonate, alkyl 3,4-dimethoxybenzyl carbonate, alkyl o-nitrobenzyl carbonate, alkyl p-nitrobenzyl carbonate, alkyl S-benzyl thiocarbonate, 4-ethoxy-1-napththyl carbonate, methyl dithiocarbonate, 2-iodobenzoate, 4-azidobutyrate, 4-nitro-4-methylpentanoate, o-(dibromomethyl)benzoate, 2-formylbenzenesulfonate, 2-(methylthiomethoxy)ethyl, 4-(methylthiomethoxy) butyrate, 2-(methylthiomethoxymethyl)benzoate, 2,6-dichloro-4-methylphenoxyacetate, 2,6-dichloro-4-(1,1,3,3-tetramethylbutyl) phenoxyacetate, 2,4-bis(1,1-dimethylpropyl) phenoxyacetate, chlorodiphenylacetate, isobutyrate, monosuccinoate, (E)-2-methyl-2-butenoate, o-(methoxycarbonyl)benzoate, a-naphthoate, nitrate, alkyl N,N,N′,N′-tetramethylphosphorodiamidate, alkyl N-phenylcarbamate, borate, dimethylphosphinothioyl, alkyl 2,4-dinitrophenylsulfenate, sulfate, methanesulfonate (mesylate), benzylsulfonate, and tosylate (Ts). For protecting 1,2- or 1,3-diols, the protecting groups include methylene acetal, ethylidene acetal, 1-t-butylethylidene ketal, 1-phenylethylidene ketal, (4-methoxyphenyl)ethylidene acetal, 2,2,2-trichloroethylidene acetal, acetonide, cyclopentylidene ketal, cyclohexylidene ketal, cycloheptylidene ketal, benzylidene acetal, p-methoxybenzylidene acetal, 2,4-dimethoxybenzylidene ketal, 3,4-dimethoxybenzylidene acetal, 2-nitrobenzylidene acetal, methoxymethylene acetal, ethoxymethylene acetal, dimethoxymethylene ortho ester, 1-methoxyethylidene ortho ester, 1-ethoxyethylidine ortho ester, 1,2-dimethoxyethylidene ortho ester, a-methoxybenzylidene ortho ester, 1-(N,N-dimethylamino)ethylidene derivative, α-(N,N′-dimethylamino)benzylidene derivative, 2-oxacyclopentylidene ortho ester, di-t-butylsilylene group (DTBS), 1,3-(1,1,3,3-tetraisopropyldisiloxanylidene) derivative (TIPDS), tetra-t-butoxydisiloxane-1,3-diylidene derivative (TBDS), cyclic carbonates, cyclic boronates, ethyl boronate, and phenyl boronate.

[0129] In some embodiments, a hydroxyl protecting group is acetyl, t-butyl, tbutoxymethyl, methoxymethyl, tetrahydropyranyl, 1-ethoxyethyl, 1-(2-chloroethoxy)ethyl, 2-trimethylsilylethyl, p-chlorophenyl, 2,4-dinitrophenyl, benzyl, benzoyl, p-phenylbenzoyl, 2,6-dichlorobenzyl, diphenylmethyl, p-nitrobenzyl, triphenylmethyl (trityl), 4,4′-dimethoxytrityl, trimethylsilyl, triethylsilyl, t-butyldimethylsilyl, t-butyldiphenylsilyl, triphenylsilyl, triisopropylsilyl, benzoylformate, chloroacetyl, trichloroacetyl, trifiuoroacetyl, pivaloyl, 9-fluorenylmethyl carbonate, mesylate, tosylate, triflate, trityl, monomethoxytrityl (MMTr), 4,4′-dimethoxytrityl, (DMTr) and 4,4′,4″-trimethoxytrityl (TMTr), 2-cyanoethyl (CE or Cne), 2-(trimethylsilyl)ethyl (TSE), 2-(2-nitrophenyl)ethyl, 2-(4-cyanophenyl)ethyl 2-(4-nitrophenyl) ethyl (NPE), 2-(4-nitrophenylsulfonyl)ethyl, 3,5-dichlorophenyl, 2,4-dimethylphenyl, 2-nitrophenyl, 4-nitrophenyl, 2,4,6-trimethylphenyl, 2-(2-nitrophenyl)ethyl, butylthiocarbonyl, 4,4′,4″-tris(benzoyloxy)trityl, diphenylcarbamoyl, levulinyl, 2-(dibromomethyl)benzoyl (Dbmb), 2-(isopropylthiomethoxymethyl)benzoyl (Ptmt), 9-phenylxanthen-9-yl (pixyl) or 9-(p-methoxyphenyl) xanthine-9-yl (MOX). In some embodiments, each of the hydroxyl protecting groups is, independently selected from acetyl, benzyl, t-butyldimethylsilyl, t-butyldiphenylsilyl and 4,4′-dimethoxytrityl. In some embodiments, the hydroxyl protecting group is selected from the group consisting of trityl, monomethoxytrityl and 4,4′-dimethoxytrityl group. In some embodiments, a phosphorous linkage protecting group is a group attached to the phosphorous linkage (e.g., an internucleotidic linkage) throughout oligonucleotide synthesis. In some embodiments, a protecting group is attached to a sulfur atom of an phosphorothioate group. In some embodiments, a protecting group is attached to an oxygen atom of an internucleotide phosphorothioate linkage. In some embodiments, a protecting group is attached to an oxygen atom of the internucleotide phosphate linkage. In some embodiments a protecting group is 2-cyanoethyl (CE or Cne), 2-trimethylsilylethyl, 2-nitroethyl, 2-sulfonylethyl, methyl, benzyl, o-nitrobenzyl, 2-(p-nitrophenyl)ethyl (NPE or Npe), 2-phenylethyl, 3-(N-tert-butylcarboxamido)-1-propyl, 4-oxopentyl, 4-methylthio-1-butyl, 2-cyano-1,1-dimethylethyl, 4—N-methylaminobutyl, 3-(2-pyridyl)-1-propyl, 2-[N-methyl-N-(2-pyridyl)]aminoethyl, 2-(N-formyl,N-methyl)aminoethyl, or 4-[N-methyl-N-(2,2,2-trifluoroacetyl)amino]butyl.

[0130] Protected thiols are well known in the art and include those described in detail in Greene (1999). Suitable protected thiols further include, but are not limited to, disulfides, thioethers, silyl thioethers, thioesters, thiocarbonates, and thiocarbamates, and the like. Examples of such groups include, but are not limited to, alkyl thioethers, benzyl and substituted benzyl thioethers, triphenylmethyl thioethers, and trichloroethoxycarbonyl thioester, to name but a few.

[0131] Reference: As used herein describes a standard or control relative to which a comparison is performed. For example, in some embodiments, an agent, animal, individual, population, sample, sequence or value of interest is compared with a reference or control agent, animal, individual, population, sample, sequence or value. In some embodiments, a reference or control is tested and/or determined substantially simultaneously with the testing or determination of interest. In some embodiments, a reference or control is a historical reference or control, optionally embodied in a tangible medium. Typically, as would be understood by those skilled in the art, a reference or control is determined or characterized under comparable conditions or circumstances to those under assessment. Those skilled in the art will appreciate when sufficient similarities are present to justify reliance on and/or comparison to a particular possible reference or control.

[0132] Specificity: As is known in the art, “specificity” is a measure of the ability of a particular ligand (e.g., an agent) to distinguish its binding partner (e.g., beta-catenin) from other potential binding partners (e.g., another protein, another portion (e.g., domain) of beta-catenin).

[0133] Substitution: As described herein, compounds of the disclosure may contain optionally substituted and/or substituted moieties. In general, the term “substituted,” whether preceded by the term “optionally” or not, means that one or more hydrogens of the designated moiety are replaced with a suitable substituent. Unless otherwise indicated, an “optionally substituted” group may have a suitable substituent at each substitutable position of the group, and when more than one position in any given structure may be substituted with more than one substituent selected from a specified group, the substituent may be either the same or different at every position. Combinations of substituents envisioned by this disclosure are preferably those that result in the formation of stable or chemically feasible compounds. The term “stable,” as used herein, refers to compounds that are not substantially altered when subjected to conditions to allow for their production, detection, and, in certain embodiments, their recovery, purification, and use for one or more of the purposes disclosed herein. In some embodiments, example substituents are described below.

[0134] Suitable monovalent substituents are halogen; —(CH₂)₀₋₄R^{○}; —(CH₂)₀₋₄OR^{○}; —O(CH₂)₀₋₄R^{○}, —O—(CH₂)₀₋₄C(O)OR^{○}; —(CH₂)₀₋₄CH(OR^{○})₂; —(CH₂)₀₋₄Ph, which may be substituted with R^{○}; —(CH₂)₀₋₄O(CH₂)₀₋₁Ph which may be substituted with R^{○}; —CH═CHPh, which may be substituted with R^{○}; —(CH₂)₀₋₄O(CH₂)_{0 1}-pyridyl which may be substituted with R^{○}; —NO₂; —CN; —N₃; —(CH₂)₀₋₄N(R^{○})₂; —(CH₂)₀₋₄N(R^{○}C(O)R^{○}; —N(R^{○}C(S)R^{○}; —(CH₂)₀₋₄N(R^{○}C(O)N(R^{○})₂; —N(R^{○}C(S)N(R^{○})₂; —(CH₂)₀₋₄N(R^{○}C(O)OR^{○}; —N(R^{○}N(R^{○}C(O)R^{○}; —N(R^{○}N(R^{○}C(O)N(R^{○})₂; —N(R^{○}N(R^{○}C(O)OR^{○}; —(CH₂)₀₋₄C(O)R^{○}; —C(S)R^{○}; —(CH₂)₀₋₄C(O)OR^{○}; —(CH₂)₀₋₄C(O)SR^{○}; —(CH₂)₀₋₄C(O)OSi(R^{○})₃; —(CH₂)₀₋₄OC(O)R^{○}; —OC(O)(CH₂)₀₋₄SR^{○}, —SC(S)SR^{○}; —(CH₂)₀₋₄SC(O)R^{○}; —(CH₂)₀₋₄C(O)N(R^{○})₂; —C(S)N(R^{○})₂; —C(S)SR^{○}; —SC(S)SR^{○}, —(CH₂)₀₋₄OC(O)N(R^{○})₂; —C(O)N(OR^{○})R^{○}; —C(O)C(O)R^{○}; —C(O)CH₂C(O)R^{○}; —C(NOR^{○})R^{○}; —(CH₂)₀₋₄SSR^{○}; —(CH₂)₀₋₄S(O)₂R^{○}; —(CH₂)₀₋₄S(O)₂OR^{○}; —(CH₂)₀₋₄OS(O)₂R^{○}; —S(O)₂N(R^{○})₂; —(CH₂)₀₋₄S(O)R^{○}; —N(R^{○})S(O)₂N(R^{○})₂; —N(R^{○})S(O)₂R^{○}; —N(OR^{○})R^{○}; —C(NH)N(R^{○})₂; —Si(R^{○})₃; —OSi(R^{○})₃; —P(R^{○})₂; —P(OR^{○})₂; —OP(R^{○})₂; —OP(OR^{○})₂; —N(R^{○})P(R^{○})₂; —B(R^{○})₂; —OB(R^{○})₂; —P(O)(R^{○})₂; —OP(O)(R^{○})₂; —N(R^{○})P(O)(R^{○})₂; —(C₁₋₄ straight or branched alkylene)O—N(R^{○})₂; or —(C₁₋₄ straight or branched alkylene)C(O)O—N(R^{○})₂; wherein each R^{○} may be substituted as defined below and is independently hydrogen, C₁₋₂₀ (e.g., C₁₋₁₅, C₁₋₁₀, C₁₋₆, C₁₋₄, etc.) aliphatic, C₁₋₂₀ (e.g., C₁₋₁₅, C₁₋₁₀, C₁₋₆, C₁₋₄, etc.) heteroaliphatic having 1-5 heteroatoms independently selected from nitrogen, oxygen, sulfur, silicon and phosphorus, —CH₂—(C₆₋₁₄ (e.g., C₆₋₁₀, C₆, C₁₀, etc.) aryl), —O(CH₂)₀₋₁(C₆₋₁₄ (e.g., C₆₋₁₀, C₆, C₁₀, etc.) aryl), —CH₂—(5-14 (e.g., 5-10, 5-9, 5-6, etc.) membered heteroaryl ring), a 3-20 (e.g., 3-15, 3-10, 3-6, 5-10, 5-6, 3, 4, 5, 6, 7, 8, 9, 10, 11, 12, 13, 14, 15, 16, 17, 18, 19, 20, etc.) membered, monocyclic, bicyclic, or polycyclic, saturated, partially unsaturated or aryl ring having 0-5 heteroatoms independently selected from nitrogen, oxygen, sulfur, silicon and phosphorus, or, notwithstanding the definition above, two independent occurrences of R^{○}, taken together with their intervening atom(s), form a 3-20 (e.g., 3-15, 3-10, 3-6, 5-10, 5-6, 3, 4, 5, 6, 7, 8, 9, 10, 11, 12, 13, 14, 15, 16, 17, 18, 19, 20, etc.) membered, monocyclic, bicyclic, or polycyclic, saturated, partially unsaturated or aryl ring having 0-5 heteroatoms independently selected from nitrogen, oxygen, sulfur, silicon and phosphorus, which may be substituted as defined below.

[0135] Suitable monovalent substituents on R^{○} (or the ring formed by taking two independent occurrences of R^{○} together with their intervening atoms), are independently halogen, —(CH₂)₀₋₂R^{○},)-(haloR^{●}, (CH₂)₀₋₂OH, —(CH₂)₀₋₂OR^{○}, —(CH₂)₀₋₂CH(OR^{○})₂; —O(haloR^{●}), —CN, —N₃, —(CH₂)₀₋₂C(O)R^{○}, —(CH₂)₀₋₂C(O)OH, —(CH₂)₀₋₂C(O)OR^{●}, —(CH₂)₀₋₂SR^{●}, —(CH₂)₀₋₂SH, —(CH₂)₀₋₂NH₂, —(CH₂)₀₋₂NHR^{●}, —(CH₂)_{0- 2}NR^{●}₂, —NO₂, —SiR^{●}₃, —OSiR^{●}₃, —C(O)SR^{●}, —(C_{1 4} straight or branched alkylene)C(O)OR^{●}, or —SSR^{●} wherein each R^{●} is unsubstituted or where preceded by “halo” is substituted only with one or more halogens, and is independently selected from C₁₋₄ aliphatic, —CH₂Ph, —O(CH₂)₀₋₁Ph, or a 3-6 (e.g., 3-5, 5-6, etc.)-membered saturated, partially unsaturated, or aryl ring having 0-4 heteroatoms independently selected from nitrogen, oxygen, and sulfur. Suitable divalent substituents on a saturated carbon atom of R^{○} include ═O and ═S.

[0136] Suitable divalent substituents are the following: ═O, ═S, ═NNR*₂, ═NNHC(O)R*, ═NNHC(O)OR*, ═NNHS(O)₂R*, ═NR*, ═NOR*, —O(C(R*₂))₂₋₃O—, or —S(C(R*₂))₂₋₃S—, wherein each independent occurrence of R* is selected from hydrogen, C₁₋₆ aliphatic which may be substituted as defined below, or an unsubstituted 3-6 (e.g., 3-5, 5-6, etc.)-membered saturated, partially unsaturated, or aryl ring having 0-4 heteroatoms independently selected from nitrogen, oxygen, and sulfur. Suitable divalent substituents that are bound to vicinal substitutable carbons of an “optionally substituted” group include:—O(CR*₂)₂₋₃O—, wherein each independent occurrence of R* is selected from hydrogen, C₁₋₆ aliphatic which may be substituted as defined below, or an unsubstituted 3-6 (e.g., 3-5, 5-6, etc.)-membered saturated, partially unsaturated, or aryl ring having 0-4 heteroatoms independently selected from nitrogen, oxygen, and sulfur.

[0137] Suitable substituents on the aliphatic group of R* are halogen, —R^{●}, -(haloR^{●}), —OH, —OR^{●}, —O(haloR^{●}, —CN, —C(O)OH, —C(O)OR^{●}, —NH₂, —NHR^{●}, —NR^{●}₂, or —NO₂, wherein each R^{○} is unsubstituted or where preceded by “halo” is substituted only with one or more halogens, and is independently C₁₋₄ aliphatic, —CH₂Ph, —O(CH₂)₀₋₁Ph, or a 3-6 (e.g., 3-5, 5-6, etc.)-membered saturated, partially unsaturated, or aryl ring having 0-4 heteroatoms independently selected from nitrogen, oxygen, and sulfur.

[0138] In some embodiments, suitable substituents on a substitutable nitrogen are —R^{†}, —NR^{†}₂, —C(O)R^{†}, C(O)OR^{†}, —C(O)C(O)R^{†}, —C(O)CH₂C(O)R^{†}, —S(O)₂R^{†}, —S(O)₂NR^{†}₂, —C(S)NR^{†}₂, —C(NH)NR^{†}₂, or —N(R^{†})S(O)₂R^{†}; wherein each R^{†} is independently hydrogen, C₁₋₆ aliphatic which may be substituted as defined below, unsubstituted —OPh, or an unsubstituted 3-6 (e.g., 3-5, 5-6, etc.)-membered saturated, partially unsaturated, or aryl ring having 0-4 heteroatoms independently selected from nitrogen, oxygen, and sulfur, or, notwithstanding the definition above, two independent occurrences of R^{†}, taken together with their intervening atom(s) form an unsubstituted 3-12 (e.g., 3-10, 3-6, 5-10, 5-6, 3, 4, 5, 6, 7, 8, 9, 10, etc.) membered saturated, partially unsaturated, or aryl mono- or bicyclic ring having 0-4 heteroatoms independently selected from nitrogen, oxygen, and sulfur.

[0139] Suitable substituents on the aliphatic group of R^{†} are independently halogen, —R^{●}, —(haloR^{●}), —OH, —OR^{●}, —O(haloR^{●}), —CN, —C(O)OH, —C(O)OR^{●}, —NH₂, —NHR^{●}, —NR^{●}₂, or —NO₂, wherein each R^{●} is unsubstituted or where preceded by “halo” is substituted only with one or more halogens, and is independently C₁₋₄ aliphatic, —CH₂Ph, —O(CH₂)₀₋₁Ph, or a 3-6 (e.g., 3-5, 5-6, etc.)-membered saturated, partially unsaturated, or aryl ring having 0-4 heteroatoms independently selected from nitrogen, oxygen, and sulfur.

[0140] Subject: As used herein, the term “subject” or “test subject” refers to any organism to which a provided compound or composition is administered in accordance with the present disclosure e.g., for experimental, diagnostic, prophylactic, and/or therapeutic purposes. Typical subjects include animals (e.g., mammals such as mice, rats, rabbits, non-human primates, and humans; insects; worms; etc.) and plants. In some embodiments, a subject may be suffering from, and/or susceptible to a disease, disorder, and/or condition. In some embodiments, a subject is a human.

[0141] Susceptible to: An individual who is “susceptible to” a disease, disorder, and/or condition is one who has a higher risk of developing the disease, disorder, and/or condition than does a member of the general public. In some embodiments, an individual who is susceptible to a disease, disorder and/or condition may not have been diagnosed with the disease, disorder, and/or condition. In some embodiments, an individual who is susceptible to a disease, disorder, and/or condition may exhibit symptoms of the disease, disorder, and/or condition. In some embodiments, an individual who is susceptible to a disease, disorder, and/or condition may not exhibit symptoms of the disease, disorder, and/or condition. In some embodiments, an individual who is susceptible to a disease, disorder, and/or condition will develop the disease, disorder, and/or condition. In some embodiments, an individual who is susceptible to a disease, disorder, and/or condition will not develop the disease, disorder, and/or condition.

[0142] Target polypeptide: A “target polypeptide”, as that term is used herein, is a polypeptide with which an agent interacts. In some embodiments, a target polypeptide is a beta-catenin polypeptide. In some embodiments, a target polypeptide comprises, consists essentially of, or is a binding site of beta-catenin polypeptide.

[0143] Target residue: A “target residue”, as that term is used herein, is a residue within a target polypeptide with which an agent is designed to interact. For example, an agent may be characterized by particular interaction motifs (e.g., aromatic groups as described herein) and/or residues (e.g., amino acid residues comprising aromatic groups as described herein) selected and arranged (by virtue of being presented on the selected scaffold) to be within a certain predetermined distance (or volume) of a target residue. In some embodiments, a target residue is or comprises an amino acid residue.

[0144] Therapeutic agent: As used herein, the phrase “therapeutic agent” refers to an agent that, when administered to a subject, has a therapeutic effect and/or elicits a desired biological and/or pharmacological effect. In some embodiments, a therapeutic agent is any substance that can be used to alleviate, ameliorate, relieve, inhibit, prevent, delay onset of, reduce severity of, and/or reduce incidence of one or more symptoms or features of a disease, disorder, and/or condition.

[0145] Therapeutic regimen: A “therapeutic regimen”, as that term is used herein, refers to a dosing regimen whose administration across a relevant population may be correlated with a desired or beneficial therapeutic outcome.

[0146] Therapeutically effective amount: As used herein, the term “therapeutically effective amount” means an amount of a substance (e.g., a therapeutic agent, composition, and/or formulation) that elicits a desired biological response when administered as part of a therapeutic regimen. In some embodiments, a therapeutically effective amount of a substance is an amount that is sufficient, when administered to a subject suffering from or susceptible to a disease, disorder, and/or condition, to treat, diagnose, prevent, and/or delay the onset of the disease, disorder, and/or condition. As will be appreciated by those of ordinary skill in this art, the effective amount of a substance may vary depending on such factors as the desired biological endpoint, the substance to be delivered, the target cell or tissue, etc. For example, the effective amount of compound in a formulation to treat a disease, disorder, and/or condition is the amount that alleviates, ameliorates, relieves, inhibits, prevents, delays onset of, reduces severity of and/or reduces incidence of one or more symptoms or features of the disease, disorder, and/or condition. In some embodiments, a therapeutically effective amount is administered in a single dose; in some embodiments, multiple unit doses are required to deliver a therapeutically effective amount.

[0147] Treat: As used herein, the term “treat,” “treatment,” or “treating” refers to any method used to partially or completely alleviate, ameliorate, relieve, inhibit, prevent, delay onset of, reduce severity of, and/or reduce incidence of one or more symptoms or features of a disease, disorder, and/or condition. Treatment may be administered to a subject who does not exhibit signs of a disease, disorder, and/or condition. In some embodiments, treatment may be administered to a subject who exhibits only early signs of the disease, disorder, and/or condition, for example for the purpose of decreasing the risk of developing pathology associated with the disease, disorder, and/or condition.

[0148] Unit dose: The expression “unit dose” as used herein refers to an amount administered as a single dose and/or in a physically discrete unit of a pharmaceutical composition. In many embodiments, a unit dose contains a predetermined quantity of an active agent. In some embodiments, a unit dose contains an entire single dose of the agent. In some embodiments, more than one unit dose is administered to achieve a total single dose. In some embodiments, administration of multiple unit doses is required, or expected to be required, in order to achieve an intended effect. A unit dose may be, for example, a volume of liquid (e.g., an acceptable carrier) containing a predetermined quantity of one or more therapeutic agents, a predetermined amount of one or more therapeutic agents in solid form, a sustained release formulation or drug delivery device containing a predetermined amount of one or more therapeutic agents, etc. It will be appreciated that a unit dose may be present in a formulation that includes any of a variety of components in addition to the therapeutic agent(s). For example, acceptable carriers (e.g., pharmaceutically acceptable carriers), diluents, stabilizers, buffers, preservatives, etc., may be included as described infra. It will be appreciated by those skilled in the art, in many embodiments, a total appropriate daily dosage of a particular therapeutic agent may comprise a portion, or a plurality, of unit doses, and may be decided, for example, by the attending physician within the scope of sound medical judgment. In some embodiments, the specific effective dose level for any particular subject or organism may depend upon a variety of factors including the disorder being treated and the severity of the disorder; activity of specific active compound employed; specific composition employed; age, body weight, general health, sex and diet of the subject; time of administration, and rate of excretion of the specific active compound employed; duration of the treatment; drugs and/or additional therapies used in combination or coincidental with specific compound(s) employed, and like factors well known in the medical arts.

[0149] Unsaturated: The term “unsaturated” as used herein, means that a moiety has one or more units of unsaturation.

[0150] Unless otherwise specified, salts, such as pharmaceutically acceptable acid or base addition salts, stereoisomeric forms, and tautomeric forms, of provided compound are included.

[0151] As used herein in the present disclosure, unless otherwise clear from context, (i) the term “a” or “an” may be understood to mean “at least one”; (ii) the term “or” may be understood to mean “and/or”; (iii) the terms “comprising”, “comprise”, “including” (whether used with “not limited to” or not), and “include” (whether used with “not limited to” or not) may be understood to encompass itemized components or steps whether presented by themselves or together with one or more additional components or steps; (iv) the term “another” may be understood to mean at least an additional/second one or more; (v) the terms “about” and “approximately” may be understood to permit standard variation as would be understood by those of ordinary skill in the art; and (vi) where ranges are provided, endpoints are included.

### Stapled Peptides

[0152] In some embodiments, a provided agent is or comprises a peptide. In some embodiments, a provided agent is a peptide. In some embodiments, a peptide is a stapled peptide. In some embodiments, a provided agent is a stapled peptide. In some embodiments, a peptide is a stitched peptide. In some embodiments, a provided agent is a stitched peptide. In some embodiments, a stitched peptide comprises two or more staples, wherein two staples are bonded to the same peptide backbone atom. Stapled peptides as described herein are typically peptides in which two or more amino acids of a peptide chain are linked through connection of two peptide backbone atoms of the amino acid residues and, as is understood by those skilled in the art, the connection is not through the peptide backbone between the linked amino acid residues. In some embodiments, a staple as described herein is a linker that link one amino acid residue to another amino acid residue, e.g., through bonding to a peptide backbone atom of each of the amino acid residues and, as is understood by those skilled in the art, the connection through a staple is not through the peptide backbone between the linked amino acid residues. In some embodiments, a staple bonds to the peptide backbone by replacing one or more hydrogen and/or substituents (e.g., side chains, O, S, etc.) on peptide backbone atoms (e.g., C, N, etc.). In some embodiments, side chains form portions of staples. In some embodiments, a staple is bonded to two carbon backbone atoms, e.g., two alpha carbon atoms. In some embodiments, a staple comprises C(R′)₂ or N(R′), either individually or as part of a large moiety, wherein R′ is R and is taken together with another group attached to a backbone atom which can be R (e.g., R^{a3}) and their intervening atoms to form a ring as described herein (e.g., when PyrS2 is stapled in various peptides).

[0153] In some embodiments, a stapled peptide comprises one or more staples. In some embodiments, a stapled peptide comprises two or more staples. In some embodiments, a stapled peptide comprises three or more staples. In some embodiments, a stapled peptide comprises four or more staples. In some embodiments, there are three staples in a stapled peptide. In some embodiments, there are four staples in a stapled peptide.

[0154] As will be appreciated by those of ordinary skill in the art, a variety of peptide stapling technologies are available, including both hydrocarbon-stapling and non-hydrocarbon-stapling technologies, and can be utilized in accordance with the present disclosure. Various technologies for stapled and stitched peptides, including various staples and/or methods for manufacturing are available and may be utilized in accordance with the present disclosure, e.g., those described in WO 2019/051327, WO 2020/041270, WO 2022/020652, WO 2022/261257, etc., the staples of each of which are incorporated herein by reference.

[0155] In some embodiments, a peptide, e.g., a stapled peptide, is or comprise a helical structure. In some embodiments, a peptide is a stapled peptide. In some embodiments, a stapled peptide is as described in WO 2022/261257 which is incorporated herein by reference. In some embodiments, an peptide is as described in WO 2022/261257. In some embodiments, an agent is as described in WO 2022/261257.

[0156] In some embodiments, a staple is a hydrocarbon staple. In some embodiments, a staple as described herein is a non-hydrocarbon staple. In some embodiments, a non-hydrocarbon staple comprises one or more chain heteroatoms wherein a chain of a staple is the shortest covalent connection within the staple from one end of the staple to the other end of the staple.

[0157] In some embodiments, a staple comprises one or more amino groups, e.g., —N(R′)—, wherein each R′ is independently as described herein. In some embodiments, —N(R′)— bonds to two carbon atoms. In some embodiments, —N(R′)— bonds to two carbon atoms, wherein neither of the two carbon atoms are bond to any heteroatoms through a double bond. In some embodiments, —N(R′)— bonds to two sp3 carbon atoms. In some embodiments, a staple comprises one or more —C(O)—N(R′)— groups, wherein each R′ is independently as described herein. In some embodiments, a staple comprises one or more carbamate groups, e.g., one or more —(O)—C(O)—N(R′)—, wherein each R′ is independently as described herein. In some embodiments, R′ is —H. In some embodiments, R′ is optionally substituted C₁₋₆ aliphatic. In some embodiments, R′ is optionally substituted C₁₋₆ alkyl. In some embodiments, R′ is C₁₋₆ aliphatic. In some embodiments, R′ is C₁₋₆ alkyl. In some embodiments, R′ is methyl.

[0158] In some embodiments, peptides, e.g., staple peptides, of the present disclosure is or comprises a helix structure. As those skilled in the art will appreciate, helixes can have various lengths. In some embodiments, lengths of helixes range from 5 to 30 amino acid residues. In some embodiments, a length of a helix is 5, 6, 7, 8, 9, 10, 11, 12, 13, 14, 15, 16, 17, 18, 19, or 20, or more, amino acid residues.

[0159] Amino acids stapled together can have various number of amino acid residues in between, e.g., 1-20, 1-15, 1-10, 1, 2, 3, 4, 5, 6, 7, 8, 9, or 10, etc. In some embodiments, a staple is (i, i+4) which means there are three amino acid residues between the two amino acids (at positions i and i+4, respectively) that bond to the staple (at positions i+1, i+2, i+3, respectively). In some embodiments, a staple is (i, i+2). In some embodiments, a staple is (i, i+3). In some embodiments, a staple is (i, i+5). In some embodiments, a staple is (i, i+6). In some embodiments, a staple is (i, i+7). In some embodiments, a staple is (i, i+8). In some embodiments, a stapled peptide comprises two staples, one is (i, i+2) and the other is (i, i+7). In some embodiments, a stapled peptide comprises two staples, one is (i, i+3) and the other is (i, i+7). In some embodiments, a stapled peptide comprises two staples, one is (i, i+3) and the other is (i, i+4). In some embodiments, a stapled peptide comprises two staples, one is (i, i+4) and the other is (i, i+7). In some embodiments, a stapled peptide comprises two staples, one is (i, i+3) and the other is (i, i+3). In some embodiments, a stapled peptide comprises two staples, one is (i, i+4) and the other is (i, i+4). In some embodiments, a stapled peptide comprises two staples, one is (i, i+7) and the other is (i, i+7). In some embodiments, the two staples are bonded to a common backbone atom, e.g., an alpha carbon atom of an amino acid residue. In some embodiments, a stapled peptide further comprises a third staple. In some embodiments, a third staple is (i, i+3). In some embodiments, a third staple is (i, i+4). In some embodiments, a third staple is (i, i+7). In some embodiments, a stapled peptide further comprises a fourth staple. In some embodiments, a fourth staple is (i, i+3). In some embodiments, a fourth staple is (i, i+4). In some embodiments, a fourth staple is (i, i+7).

[0160] In some embodiments, a staple can be of various lengths, in some embodiments, as represent by the number of chain atoms of a staple. In some embodiments, a chain of a staple is the shortest covalent connection in the staple from a first end (connection point with a peptide backbone) of a staple to a second end of the staple, wherein the first end and the second end are connected to two different peptide backbone atoms. In some embodiments, a staple comprises 5-30 chain atoms, e.g., 5-20, 5-15, 5, 6, 7, 8, 9, or 10 to 11, 12, 13, 14, 15, 16, 17, 18, 19, 20, 21, 22, 23, 24, or 25 chain atoms. In some embodiments, a staple comprises 5 chain atoms. In some embodiments, a staple comprises 6 chain atoms. In some embodiments, a staple comprises 7 chain atoms. In some embodiments, a staple comprises 8 chain atoms. In some embodiments, a staple comprises 9 chain atoms. In some embodiments, a staple comprises 10 chain atoms. In some embodiments, a staple comprises 11 chain atoms. In some embodiments, a staple comprises 12 chain atoms. In some embodiments, a staple comprises 13 chain atoms. In some embodiments, a staple comprises 14 chain atoms. In some embodiments, a staple comprises 15 chain atoms. In some embodiments, a staple comprises 16 chain atoms. In some embodiments, a staple comprises 17 chain atoms. In some embodiments, a staple comprises 18 chain atoms. In some embodiments, a staple comprises 19 chain atoms. In some embodiments, a staple comprises 20 chain atoms. In some embodiments, a staple has a length of 5 chain atoms. In some embodiments, a staple has a length of 6 chain atoms. In some embodiments, a staple has a length of 7 chain atoms. In some embodiments, a staple has a length of 8 chain atoms. In some embodiments, a staple has a length of 9 chain atoms. In some embodiments, a staple has a length of 10 chain atoms. In some embodiments, a staple has a length of 11 chain atoms. In some embodiments, a staple has a length of 12 chain atoms. In some embodiments, a staple has a length of 13 chain atoms. In some embodiments, a staple has a length of 14 chain atoms. In some embodiments, a staple has a length of 15 chain atoms. In some embodiments, a staple has a length of 16 chain atoms. In some embodiments, a staple has a length of 17 chain atoms. In some embodiments, a staple has a length of 18 chain atoms. In some embodiments, a staple has a length of 19 chain atoms. In some embodiments, a staple has a length of 20 chain atoms. In some embodiments, a staple has a length of 8-15 chain atoms. In some embodiments, a staple has 8-12 chain atoms. In some embodiments, a staple has 9-12 chain atoms. In some embodiments, a staple has 9-10 chain atoms. In some embodiments, a staple has 8-10 chain atoms. In some embodiments, length of a staple can be adjusted according to the distance of the amino acid residues it connects, for example, a longer staple may be utilized for a (i, i+7) staple than a (i, i+4) or (i, i+3) staple. In some embodiments, a (i, i+2) staple has about 5-10, 5-8, e.g., about 5, 6, 7, 8, 9 or 10 chain atoms. In some embodiments, a (i, i+2) staple has 5 chain atoms. In some embodiments, a (i, i+2) staple has 6 chain atoms. In some embodiments, a (i, i+2) staple has 7 chain atoms. In some embodiments, a (i, i+2) staple has 8 chain atoms. In some embodiments, a (i, i+2) staple has 9 chain atoms. In some embodiments, a (i, i+2) staple has 10 chain atoms. In some embodiments, a (i, i+3) staple has about 5-10, 5-8, e.g., about 5, 6, 7, 8, 9 or 10 chain atoms. In some embodiments, a (i, i+3) staple has 5 chain atoms. In some embodiments, a (i, i+3) staple has 6 chain atoms. In some embodiments, a (i, i+3) staple has 7 chain atoms. In some embodiments, a (i, i+3) staple has 8 chain atoms. In some embodiments, a (i, i+3) staple has 9 chain atoms. In some embodiments, a (i, i+3) staple has 10 chain atoms. In some embodiments, a (i, i+4) staple has about 5-12, 5-10, 7-12, 5-8, e.g., about 5, 6, 7, 8, 9, 10, 11 or 12 chain atoms. In some embodiments, a (i, i+4) staple has 5 chain atoms. In some embodiments, a (i, i+4) staple has 6 chain atoms. In some embodiments, a (i, i+4) staple has 7 chain atoms. In some embodiments, a (i, i+4) staple has 8 chain atoms. In some embodiments, a (i, i+4) staple has 9 chain atoms. In some embodiments, a (i, i+4) staple has 10 chain atoms. In some embodiments, a (i, i+4) staple has 11 chain atoms. In some embodiments, a (i, i+4) staple has 12 chain atoms. In some embodiments, a (i, i+7) staple has about 8-25, 10-25, 10-16, 12-15, e.g., about 8, 9, 10, 11, 12, 13, 14, 15, 16, 17, 18, 19, 20, 21, 22, 23, 24 or 25 chain atoms. In some embodiments, a (i, i+7) staple has 8 chain atoms. In some embodiments, a (i, i+7) staple has 9 chain atoms. In some embodiments, a (i, i+7) staple has 10 chain atoms. In some embodiments, a (i, i+7) staple has 11 chain atoms. In some embodiments, a (i, i+7) staple has 12 chain atoms. In some embodiments, a (i, i+7) staple has 13 chain atoms. In some embodiments, a (i, i+7) staple has 14 chain atoms. In some embodiments, a (i, i+7) staple has 15 chain atoms. In some embodiments, a (i, i+7) staple has 16 chain atoms. In some embodiments, a (i, i+7) staple has 17 chain atoms. In some embodiments, a (i, i+7) staple has 18 chain atoms. In some embodiments, a (i, i+7) staple has 19 chain atoms. In some embodiments, a (i, i+7) staple has 20 chain atoms. In some embodiments, a (i, i+7) staple has 21 chain atoms. In some embodiments, a (i, i+7) staple has 22 chain atoms. In some embodiments, a stapled peptide comprises three or more staples, each of which is independently such a (I, i+2), (i, i+3), (i, i+4) or (i, i+7) staple. In some embodiments, a stapled peptide comprises such a (i, i+2) staple, such a (i, i+4) staple and such a (i, i+7) staple. In some embodiments, a stapled peptide comprises such a (i, i+3) staple, such a (i, i+4) staple and such a (i, i+7) staple. In some embodiments, a stapled peptide comprises such a (i, i+3) staple, such a (i, i+7) staple and such a (i, i+7) staple.

[0161] Staple lengths may be otherwise described. For example, in some embodiments, staple lengths may be described as the total number of chain atoms and non-chain ring atoms, where a non-chain ring atom is an atom of the staple which forms a ring with one or more chain atoms but is not a chain atom in that it is not within the shortest covalent connection from a first end of the staple to a second end of the staple. In some embodiments, staples formed using Monomer A (which comprises an azetidine moiety), Monomer B (which comprises a pyrrolidine moiety), and/or Monomer C (which comprises a pyrrolidine moiety), etc., may comprise one or two non-chain ring atoms.

[0162] In some embodiments, a staple has no heteroatoms in its chain. In some embodiments, a staple comprises at least one heteroatom in its chain. In some embodiments, a staple comprises at least one nitrogen atom in its chain.

[0163] In some embodiments, a staple is L^{s}, wherein L^{s} is an optionally substituted, bivalent C₈₋₁₄ aliphatic group wherein one or more methylene units of the aliphatic group are optionally and independently replaced with —C(R′)₂—, -Cy-, —O—, —S—, —S—S—, —N(R′)—, —C(O)—, —C(S)—, —C(NR′)—, —C(O)N(R′)—, —N(R′)C(O)N(R′)—, —N(R′)C(O)O—, —S(O)—, —S(O)₂—, —S(O)₂N(R′)—, —C(O)S—, or —C(O)O—. In some embodiments, a staple is L^{s}, wherein L^{s} is an optionally substituted, bivalent C₉₋₁₃ aliphatic group wherein one or more methylene units of the aliphatic group are optionally and independently replaced with —C(R′)₂—, -Cy-, —O—, —S—, —S—S—, —N(R′)—, —C(O)—, —C(S)—, —C(NR′)—, —C(O)N(R′)—, —N(R′)C(O)N(R′)—, —N(R′)C(O)O—, —S(O)—, —S(O)₂—, —S(O)₂N(R′)—, —C(O)S—, or —C(O)O—. In some embodiments, a staple is L^{s}, wherein L^{s} is an optionally substituted, bivalent C₁₀₋₁₅ aliphatic group wherein one or more methylene units of the aliphatic group are optionally and independently replaced with —C(R′)₂—, -Cy-, —O—, —S—, —S—S—, —N(R′)—, —C(O)—, —C(S)—, —C(NR′)—, —C(O)N(R′)—, —N(R′)C(O)N(R′)—, —N(R′)C(O)O—, —S(O)—, —S(O)₂—, —S(O)₂N(R′)—, —C(O)S—, or —C(O)O—. In some embodiments, a staple is L^{s}, wherein L^{s} is an optionally substituted, bivalent C₁₁₋₁₄ aliphatic group wherein one or more methylene units of the aliphatic group are optionally and independently replaced with —C(R′)₂—, -Cy-, —O—, —S—, —S—S—, —N(R′)—, —C(O)—, —C(S)—, —C(NR′)—, —C(O)N(R′)—, —N(R′)C(O)N(R′)—, —N(R′)C(O)O—, —S(O)—, —S(O)₂—, —S(O)₂N(R′)—, —C(O)S—, or —C(O)O—. In some embodiments, a staple is a (i, i+2) staple in that not including the two amino acid residues that are directly connected to the staple, there are one amino acid residue between the two amino acid residues that are directly connected to the staple. In some embodiments, a staple is a (i, i+3) staple in that not including the two amino acid residues that are directly connected to the staple, there are two amino acid residues between the two amino acid residues that are directly connected to the staple. In some embodiments, a staple is a (i, i+4) staple in that not including the two amino acid residues that are directly connected to the staple, there are three amino acid residues between the two amino acid residues that are directly connected to the staple. In some embodiments, a staple is a (i, i+7) staple in that not including the two amino acid residues that are directly connected to the staple, there are six amino acid residues between the two amino acid residues that are directly connected to the staple.

[0164] In some embodiments, a staple comprises a double bond. In some embodiments, a staple comprises a double bond may be formed by olefin metathesis of two olefins. In some embodiments, staples are formed by metathesis reactions, e.g., involving one or more double bonds in amino acid residues as described herein. In some embodiments, a first amino acid residue comprising an olefin (e.g., AA1—CH═CH₂) and a second amino acid residue comprising an olefin (e.g., AA2—CH═CH₂) are stapled (e.g., forming AA1—CH═CH-AA2, wherein AA1 and AA2 are typically linked through one or more amino acid residues). In some embodiments, an olefin, e.g., in a staple, is converted into —CHR′—CHR′—, wherein each R′ is independently as described herein. In some embodiments, R′ is R as described herein. In some embodiments, R′ is —H. In some embodiments, each R′ is —H. In some embodiments, R′ is —OR, wherein R is as described herein. In some embodiments, R′ is —OH. In some embodiments, R′ is —N(R)₂ wherein each R is independently as described herein. In some embodiments, R′ is —SR wherein R is as described herein. In some embodiments, R′ is R wherein R is optionally substituted aliphatic, e.g., C₁₋₁₀ aliphatic. In some embodiments, R′ is R wherein R is optionally substituted aliphatic, e.g., C₁₋₁₀ alkenyl. In some embodiments, R′ is R wherein R is optionally substituted aliphatic, e.g., C₁₋₁₀ alkynyl. In some embodiments, —CHR′—CHR′— is —CH₂—CH₂—. In some embodiments, each of the two olefins is independently of a side chain of an amino acid residue. In some embodiments, each olefin is independently a terminal olefin. In some embodiments, each olefin is independently a mono-substituted olefin.

[0165] In some embodiments, amino acids that are useful for stapling, or are stapled, are described in WO 2022/261257, e.g., those of formula A-II, A-II-b, A-III, A-IV, A-V, or A-VI, or salts thereof, which are incorporated herein by reference.

[0166] In some embodiments, an amino acid is selected from Tables A-I, A-II, A-III and A-IV (may be presented as Fmoc-protected). As appreciated by those skilled in the art, among other things, when incorporated into peptides, Fmoc-protected amino groups and carboxyl groups may independently form amide connections with other amino acid residues (or N- or C-terminus capping groups, or exist as N- or C-terminus amino or carboxyl groups). Olefins, including those in Alloc groups, may be utilized to form staples through olefin metathesis. Staples comprising olefins may be further modified, e.g., through hydrogenation to convert olefin double bonds into single bonds, and/or through CO₂ extrusion to convert carbamate moieties (e.g., —O—(CO)—N(R′)—) into amine moieties (e.g., —N(R′)—). In some embodiments, an agent is or comprises a stapled peptide (e.g., a stapled peptide described according to Table E2 or Table E3) or a salt thereof, in which stapled peptide each double bond is converted into a single bond. In some embodiments, a conversion is achieved through hydrogenation which adds a-H to each olefin carbon atom. In some embodiments, an olefin double bond is replaced with —CHR′—CHR′—, wherein each R′ is independently as described herein. In some embodiments, R′ is R as described herein. In some embodiments, R′ is —H. In some embodiments, each R′ is —H. In some embodiments, R′ is —OR, wherein R is as described herein. In some embodiments, R′ is —OH. In some embodiments, R′ is —N(R)₂ wherein each R is independently as described herein. In some embodiments, R′ is —SR wherein R is as described herein. In some embodiments, R′ is R wherein R is optionally substituted aliphatic, e.g., C₁₋₁₀ aliphatic. In some embodiments, R′ is R wherein R is optionally substituted aliphatic, e.g., C₁₋₁₀ alkenyl. In some embodiments, R′ is R wherein R is optionally substituted aliphatic, e.g., C₁₋₁₀ alkynyl. In some embodiments, —CHR′—CHR′— is —CH₂—CH₂—.

TABLE A-I
Exemplary amino acids (Fmoc-Protected).
Monomer A (M_{A})

Monomer B (M_{B})

Monomer C (M_{C})

TABLE A-II
Exemplary amino acids (Fmoc-Protected).
Monomer D (M_{D})

Monomer E (M_{E})

Monomer F (M_{F})

Monomer G (M_{G})

Monomer H (M_{H})

Monomer I (M_{I})

TABLE A-III
Exemplary amino acids (Fmoc-Protected).
S3

R3

S4

R4

S5

R5

B5

S6

R6

S7

R7

S8

R8

n is 1-5, e.g., 1, 2 or 3

n is 1-5, e.g., 1, 2 or 3
PL3

PyrS

PyrS1

PyrS2

PyrS3

RdN

RcN

RgN

S₁₀

SdN

ScN

SgN

[0167] In some embodiments, an amino acid is an alpha-amino acid. In some embodiments, an amino acid is an L-amino acid. In some embodiments, an amino acid is a D-amino acid. In some embodiments, the alpha-carbon of an amino acid is achiral. In some embodiments, an amino acid is a beta-amino acid. In some embodiments, an amino acid is a gamma-amino acid.

[0168] In some embodiments, an olefin in a staple is a Z-olefin. In some embodiments, an olefin in a staple in an E-olefin. In some embodiments, a provided composition comprises stapled peptides comprising a staple that contains a Z-olefin and stapled peptides comprising a staple that contains an E-olefin. In some embodiments, a provided composition comprises stapled peptides comprising a staple that contains a Z-olefin. In some embodiments, a provided composition comprises stapled peptides comprising a staple that contains an E-olefin. In some embodiments, otherwise identical stapled peptides that differ only in the E/Z configuration of staple olefin demonstrate different properties and/or activities as demonstrated herein. In some embodiments, stapled peptides with E-olefin in a staple may provide certain desirable properties and/or activities given the context. In some embodiments, stapled peptides with Z-olefin in a staple may provide certain desirable properties and/or activities given the context.

[0169] In some embodiments, the present disclosure provides compositions comprising stapled peptides. In some embodiments, a composition comprises one and only one stereoisomer of a stapled peptide (e.g., E or Z isomer, and/or a single diastereomer/enantiomer with respect to a chiral center, etc.). In some embodiments, a composition comprises two or more stereoisomers (e.g., both E and Z isomers of one or more double bonds, and/or one or more diastereomers/enantiomers with respect to a chiral center, etc.). In some embodiments, a composition corresponds to a single peak in a chromatographic separation, e.g., HPLC. In some embodiments, a peak comprises one and only one stereoisomers. In some embodiments, a peak comprises two or more stereoisomers.

[0170] In some embodiments, two staples may be bonded to the same atom of the peptide backbone, forming a stitched peptide. In some embodiments, a staple is pro-lock wherein one end of the staple is bonded to the alpha-carbon of a proline residue. In some embodiments, a staple is a staple illustrated in Tables S-1, S-2, S-3, S-4, S-5 or S-6 of WO 2022/261257.

[0171] In some embodiments, the double bond in a (i, i+3) staple is Z. In some embodiments, the double bond in a (i, i+4) staple is Z. In some embodiments, the double bond in a (i, i+7) staple is Z. In some embodiments, the olefin is E. In some embodiments, the double bond in a (i, i+3) staple is E. In some embodiments, the double bond in a (i, i+4) staple is E. In some embodiments, the double bond in a (i, i+7) staple is E.

[0172] In some embodiments, a staple comprises —S—. In some embodiments, a staple is formed from cysteine stapling. Certain such staples are described in, e.g., WO 2022/261257.

[0173] Certain useful agents (peptides prior to stapling and stapled peptides post stapling) and compositions thereof are presented in Table E2 or Table E3 as examples, which includes various amino acid residues and N- and C-terminus capping groups for various positions as examples; also illustrated are various stapling patterns, e.g., X¹—X⁴—X¹¹, X¹—X³, X³—X⁷, X³—X¹⁰, X⁴-X¹¹, X⁷-X¹⁰, X⁷-X¹⁴, X¹⁰-X¹⁴, etc. As demonstrated herein, provided technologies can deliver improved useful properties and/or activities.

[0174] In some embodiments, a provided agent, a peptide, or a stapled peptide is a compound as described herein. In some embodiments, a provided agent has a structure selected from Table E2 or Table E3, or a salt thereof. In some embodiments, a provided agent is a stereoisomer of a structure selected from Table E2 or Table E3, or a salt thereof. In some embodiments, a provided agent is a stereoisomer, with respect to a chiral center bonded to two staples (e.g., in B4, B5, etc.), of a structure selected from Table E2 or Table E3, or a salt thereof. In some embodiments, a provided agent is a stereoisomer, with respect to olefin double bond(s) in staple(s), of a structure selected from Table E2 or Table E3, or a salt thereof. In some embodiments, a provided agent is a stereoisomer, with respect to olefin double bond(s) in staple(s) and/or a chiral center bonded to two staples (e.g., in B4, B5, etc.), of a structure selected from Table E2 or Table E3, or a salt thereof. In some embodiments, a provided composition is a composition described in Table E2 or Table E3. In some embodiments, a compound has the structure of

or a salt thereof. In some embodiments, a compound has the structure of

or a salt thereof. In some embodiments, a compound has the structure of

or a salt thereof. In some embodiments, a compound has the structure of

or a salt thereof. In some embodiments, a compound has the structure of

or a salt thereof. In some embodiments, a compound has the structure of

or a salt thereof. In some embodiments, a compound has the structure of

or a salt thereof. In some embodiments, a compound has the structure of

or a salt thereof. In some embodiments, a compound has the structure of

or a salt thereof. In some embodiments, a compound has the structure of

or a salt thereof. In some embodiments, a compound has the structure of

or a salt thereof. In some embodiments, a compound has the structure of

or a salt thereof. In some embodiments, a compound has the structure of

or a salt thereof. In some embodiments, a compound has the structure of

or a salt thereof. In some embodiments, a compound has the structure of

or a salt thereof. In some embodiments, a double bond of a (i, i+2) staple is E. In some embodiments, a double bond of a (i, i+2) staple is Z. In some embodiments, a double bond of a (i, i+3) staple is E. In some embodiments, a double bond of a (i, i+3) staple is Z. In some embodiments, a double bond of a (i, i+7) staple is E. In some embodiments, a double bond of a (i, i+7) staple is Z. In some embodiments, both double bonds are E. In some embodiments, both double bonds are Z. In some embodiments, a (i, i+3) staple is E, and the other is Z. In some embodiments, a (i, i+3) staple is Z, and the other is E. In some embodiments, a (i, i+4) staple is E, and the other is Z. In some embodiments, a (i, i+4) staple is Z, and the other is E. In some embodiments, a double bond of a (i, i+7) staple is Z, and a double bond of a second staple (e.g., (i, i+2), (i, i+3), (i, i+4), etc.) is E. In some embodiments, a double bond of a (i, i+7) staple is Z, and a double bond of a second staple (e.g., (i, i+2), (i, i+3), (i, i+4), etc.) is Z. In some embodiments, a double bond of a (i, i+7) staple is E, and a double bond of a second staple (e.g., (i, i+2), (i, i+3), (i, i+4), etc.) is E. In some embodiments, a double bond of a (i, i+7) staple is E, and a double bond of a second staple (e.g., (i, i+2), (i, i+3), (i, i+4), etc.) is Z. In some embodiments, two staples are bonded to a chiral center (e.g., a carbon atom in B5), and the chiral center is R. In some embodiments, two staples are bonded to a chiral center (e.g., a carbon atom in B5), and the chiral center is S.

[0175] In some embodiments, a compound has the structure selected from below or a salt thereof:

[0176] In some embodiments, an agent is SP-1-1 or a salt thereof. In some embodiments, an agent is SP-1-2 or a salt thereof. In some embodiments, an agent is SP-1-3 or a salt thereof. In some embodiments, an agent is SP-1-4 or a salt thereof. In some embodiments, an agent is SP-1-5 or a salt thereof. In some embodiments, an agent is SP-1-6 or a salt thereof. In some embodiments, an agent is SP-1-7 or a salt thereof. In some embodiments, an agent is SP-1-8 or a salt thereof. In some embodiments, an agent is SP-2-1 or a salt thereof. In some embodiments, an agent is SP-2-2 or a salt thereof. In some embodiments, an agent is SP-2-3 or a salt thereof. In some embodiments, an agent is SP-2-4 or a salt thereof. In some embodiments, an agent is SP-2-5 or a salt thereof. In some embodiments, an agent is SP-2-6 or a salt thereof. In some embodiments, an agent is SP-2-7 or a salt thereof. In some embodiments, an agent is SP-2-8 or a salt thereof. In some embodiments, an agent is SP-3-1 or a salt thereof. In some embodiments, an agent is SP-3-2 or a salt thereof. In some embodiments, an agent is SP-4-1 or a salt thereof. In some embodiments, an agent is SP-4-2 or a salt thereof. In some embodiments, an agent is SP-4-3 or a salt thereof. In some embodiments, an agent is SP-4-4 or a salt thereof. In some embodiments, an agent is SP-4-5 or a salt thereof. In some embodiments, an agent is SP-4-6 or a salt thereof. In some embodiments, an agent is SP-4-7 or a salt thereof. In some embodiments, an agent is SP-4-8 or a salt thereof. In some embodiments, an agent is SP-5-1 or a salt thereof. In some embodiments, an agent is SP-5-2 or a salt thereof. In some embodiments, an agent is SP-5-3 or a salt thereof. In some embodiments, an agent is SP-5-4 or a salt thereof. In some embodiments, an agent is SP-5-5 or a salt thereof. In some embodiments, an agent is SP-5-6 or a salt thereof. In some embodiments, an agent is SP-5-7 or a salt thereof. In some embodiments, an agent is SP-5-8 or a salt thereof. In some embodiments, an agent is SP-6 or a salt thereof. In some embodiments, an agent is SP-7-1 or a salt thereof. In some embodiments, an agent is SP-7-2 or a salt thereof. In some embodiments, an agent is SP-7-3 or a salt thereof. In some embodiments, an agent is SP-7-4 or a salt thereof. In some embodiments, an agent is SP-7-5 or a salt thereof. In some embodiments, an agent is SP-7-6 or a salt thereof. In some embodiments, an agent is SP-7-7 or a salt thereof. In some embodiments, an agent is SP-7-8 or a salt thereof. In some embodiments, an agent is SP-8-1 or a salt thereof. In some embodiments, an agent is SP-8-2 or a salt thereof. In some embodiments, an agent is SP-8-3 or a salt thereof. In some embodiments, an agent is SP-8-4 or a salt thereof. In some embodiments, an agent is SP-8-5 or a salt thereof. In some embodiments, an agent is SP-8-6 or a salt thereof. In some embodiments, an agent is SP-8-7 or a salt thereof. In some embodiments, an agent is SP-8-8 or a salt thereof. In some embodiments, an agent is SP-9-1 or a salt thereof. In some embodiments, an agent is SP-9-2 or a salt thereof. In some embodiments, an agent is SP-9-3 or a salt thereof. In some embodiments, an agent is SP-9-4 or a salt thereof. In some embodiments, an agent is SP-9-5 or a salt thereof. In some embodiments, an agent is SP-9-6 or a salt thereof. In some embodiments, an agent is SP-9-7 or a salt thereof. In some embodiments, an agent is SP-9-8 or a salt thereof. In some embodiments, an agent is SP-10-1 or a salt thereof. In some embodiments, an agent is SP-10-2 or a salt thereof. In some embodiments, an agent is SP-10-3 or a salt thereof. In some embodiments, an agent is SP-10-4 or a salt thereof. In some embodiments, an agent is SP-10-5 or a salt thereof. In some embodiments, an agent is SP-10-6 or a salt thereof. In some embodiments, an agent is SP-10-7 or a salt thereof. In some embodiments, an agent is SP-10-8 or a salt thereof. In some embodiments, an agent is SP-11-1 or a salt thereof. In some embodiments, an agent is SP-11-2 or a salt thereof. In some embodiments, an agent is SP-11-3 or a salt thereof. In some embodiments, an agent is SP-11-4 or a salt thereof. In some embodiments, an agent is SP-11-5 or a salt thereof. In some embodiments, an agent is SP-11-6 or a salt thereof. In some embodiments, an agent is SP-11-7 or a salt thereof. In some embodiments, an agent is SP-11-8 or a salt thereof. In some embodiments, an agent is SP-12-1 or a salt thereof. In some embodiments, an agent is SP-12-2 or a salt thereof. In some embodiments, an agent is SP-12-3 or a salt thereof. In some embodiments, an agent is SP-12-4 or a salt thereof. In some embodiments, an agent is SP-12-5 or a salt thereof. In some embodiments, an agent is SP-12-6 or a salt thereof. In some embodiments, an agent is SP-12-7 or a salt thereof. In some embodiments, an agent is SP-12-8 or a salt thereof. In some embodiments, an agent is SP-13-1 or a salt thereof. In some embodiments, an agent is SP-13-2 or a salt thereof. In some embodiments, an agent is SP-13-3 or a salt thereof. In some embodiments, an agent is SP-13-4 or a salt thereof. In some embodiments, an agent is SP-13-5 or a salt thereof. In some embodiments, an agent is SP-13-6 or a salt thereof. In some embodiments, an agent is SP-13-7 or a salt thereof. In some embodiments, an agent is SP-13-8 or a salt thereof. In some embodiments, an agent is SP-14-1 or a salt thereof. In some embodiments, an agent is SP-14-2 or a salt thereof. In some embodiments, an agent is SP-14-3 or a salt thereof. In some embodiments, an agent is SP-14-4 or a salt thereof. In some embodiments, an agent is SP-14-5 or a salt thereof. In some embodiments, an agent is SP-14-6 or a salt thereof. In some embodiments, an agent is SP-14-7 or a salt thereof. In some embodiments, an agent is SP-14-8 or a salt thereof. In some embodiments, an agent is SP-15-1 or a salt thereof. In some embodiments, an agent is SP-15-2 or a salt thereof. In some embodiments, an agent is SP-15-3 or a salt thereof. In some embodiments, an agent is SP-15-4 or a salt thereof. In some embodiments, an agent is SP-15-5 or a salt thereof. In some embodiments, an agent is SP-15-6 or a salt thereof. In some embodiments, an agent is SP-15-7 or a salt thereof. In some embodiments, an agent is SP-15-8 or a salt thereof.

[0177] In some embodiments, an agent is selected from:

or a salt thereof.

[0178] Agents, e.g., peptides including stapled peptides, can contain various numbers of amino acid residues. In some embodiments, a length of a peptide agent is about 5-20, 5-19, 5-18, 5-17, 5-16, 5-15, 10-20, 10-19, 10-18, 10-17, 10-16, 10-15, 11-20, 11-19, 11-18, 11-17, 11-16, 11-15, 12-20, 12-19, 12-18, 12-17, 12-16, 12-15, 13-20, 13-19, 13-18, 13-17, 13-16, 13-15, 14-20, 14-19, 14-18, 14-17, 14-16, 14-15, or about 2, 3, 4, 5, 6, 7, 8, 9, 10, 11, 12, 13, 14, 15, 16, 17, 18, 19, or 20 amino acid residues. In some embodiments, a length is about 10 amino acid residues. In some embodiments, a length is about 11 amino acid residues. In some embodiments, a length is about 12 amino acid residues. In some embodiments, a length is about 13 amino acid residues. In some embodiments, a length is about 14 amino acid residues. In some embodiments, a length is about 15 amino acid residues. In some embodiments, a length is about 16 amino acid residues. In some embodiments, a length is about 17 amino acid residues. In some embodiments, a length is about 18 amino acid residues. In some embodiments, a length is about 19 amino acid residues. In some embodiments, a length is about 20 amino acid residues.

[0179] In some embodiments, as described herein, one or more staples independently comprise an olefin double bond (e.g., formed through olefin metathesis). In some embodiments, one or more staples independently comprise an amide group (e.g., formed through amidation). In some embodiments, at least one staple does not contain an olefin double bond. In some embodiments, there is at least one staple whose formation does not comprise reactions of olefins such as olefin metathesis and/or modification of olefin double bonds (e.g., hydrogenation, epoxidation, etc.).

[0180] In some embodiments, a residue of a staple (e.g., B5) is so positioned that if its position is P (e.g., X⁴), a first acidic amino acid residue is at position P-2 (e.g., X²), a second acidic amino acid residue is positioned at P+1 (e.g., X⁵), a third acidic amino acid residue is positioned at P+2 (e.g., X⁶), a hydrophobic amino acid residue is positioned at P+4 (e.g., X⁸), a first aromatic amino acid residue is positioned at P+5 (e.g., X⁹), a second aromatic amino acid residue is positioned at P+8 (e.g., X¹²), and/or a third aromatic amino acid residue is positioned at P+9 (e.g., X¹³). In some embodiments, a staple is a (i, i+7) staple, and the other residue of the staple is positioned at P+7 (e.g., X¹¹). In some embodiments, a first acidic amino acid residue is at position P-2 (e.g., X²). In some embodiments, a second acidic amino acid residue is positioned at P+1 (e.g., X⁵). In some embodiments, a third acidic amino acid residue is positioned at P+2 (e.g., X⁶). In some embodiments, a hydrophobic amino acid residue is positioned at P+4 (e.g., X⁸). In some embodiments, a first aromatic amino acid residue is positioned at P+5 (e.g., X⁹). In some embodiments, a second aromatic amino acid residue is positioned at P+8 (e.g., X¹²). In some embodiments, a third aromatic amino acid residue is positioned at P+9 (e.g., X¹³). In some embodiments, a first acidic amino acid residue is at position P-2 (e.g., X²), a second acidic amino acid residue is positioned at P+1 (e.g., X⁵), a first aromatic amino acid residue is positioned at P+5 (e.g., X⁹), a second aromatic amino acid residue is positioned at P+8 (e.g., X¹²), and a third aromatic amino acid residue is positioned at P+9 (e.g., X¹³). In some embodiments, a first acidic amino acid residue is at position P-2 (e.g., X²), a second acidic amino acid residue is positioned at P+1 (e.g., X⁵), a third acidic amino acid residue is positioned at P+2 (e.g., X⁶), a hydrophobic amino acid residue is positioned at P+4 (e.g., X⁸), a first aromatic amino acid residue is positioned at P+5 (e.g., X⁹), a second aromatic amino acid residue is positioned at P+8 (e.g., X¹²), and a third aromatic amino acid residue is positioned at P+9 (e.g., X¹³). In some embodiments, a stapled peptide agent comprises acidic amino acid residues at positions P-2 and P+1, and aromatic amino acid residues at positions P+5, P+8 and P+9. In some embodiments, a stapled peptide agent comprises acidic amino acid residues at positions P-2, P+1 and P+2, and aromatic amino acid residues at positions P+5, P+8 and P+9. In some embodiments, a stapled peptide agent comprises acidic amino acid residues at positions P-2 and P+1, a hydrophobic amino acid residue at position P+4, and aromatic amino acid residues at positions P+5, P+8 and P+9. In some embodiments, a stapled peptide agent comprises acidic amino acid residues at positions P-2, P+1 and P+2, a hydrophobic amino acid residue at position P+4, and aromatic amino acid residues at positions P+5, P+8 and P+9. In some embodiments, P is 3. In some embodiments, P is 4. In some embodiments, P is 5. In some embodiments, P is 6. In some embodiments, P is 7. In some embodiments, an amino acid residue at position P comprises two groups for stapling, e.g., B4, B5, B6, etc. In some embodiments, it is B4. In some embodiments, it is B5. In some embodiments, it is B6. In some embodiments, an agent comprises a staple and a first additional staple, e.g., a (i, i+3) or (i, i+4) staple. In some embodiments, a staple and a first additional staple are bonded to the same residue (e.g., B5, B6, etc.). In some embodiments, the other residue of a first additional residue is at position P-2 (e.g., when a moiety for stapling like a terminal olefin is in a P-terminal group which is considered a portion of X¹), P-3 or P-4. In some embodiments, an agent comprises a second additional staple, e.g., a (i, i+4) staple (e.g., stapling residues at positions P+6 (e.g., X¹⁰) and P+10 (e.g., X¹⁴), a (i, i+3) staple (e.g., stapling residues at positions P+3 (e.g., X⁷) and P+6 (e.g., X¹⁰), a (i, i+7) staple (e.g., stapling residues at positions P+3 (e.g., X⁷) and P+10 (e.g., X¹⁴), etc.). In some embodiments, an agent comprises a second additional staple which is a (i, i+4) staple stapling residues at positions P+6 (e.g., X¹⁰) and P+10 (e.g., X¹⁴). In some embodiments, an agent comprises a third additional staple, e.g., a (i, i+4) staple stapling residues at positions P-1 (e.g., X³) and P+3 (e.g., X⁷). In some embodiments, there are three staples in a stapled peptide agent. In some embodiments, there are four staples in a stapled peptide agent. As demonstrated herein, stapled agents comprising so positioned staples and residues can provide various desired properties and activities. In some embodiments, positioning of one or more staples may be shifted relevant to various acidic, hydrophobic and/or aromatic amino acid residues described herein, e.g., in some embodiments, stapled peptide agents comprise stapled residues at position P and P+7 (and optionally P-3 or P-4), acidic amino acid residues are at positions P-1, and P+2, and aromatic amino acid residues at positions P+6, P+9 and P+10, and optionally an acid amino acid residue at P+3 and/or a hydrophobic amino acid residue at position P+5. It was observed that various stapled peptide agents with shifted staples can bind to beta-catenin when assessed by fluorescence polarization.

[0181] Certain useful staples are described in the “Agents” section, below.

[0182] Certain stapled peptides are described in WO 2022/020652 and WO 2022/261257, the stapled peptides of each of which are independently incorporated herein by reference.

### Beta-Catenin

[0183] Among other things, the present disclosure provides technologies for modulating one or more beta-catenin functions. In some embodiments, the present disclosure provides useful technologies for inhibiting one or more beta-catenin functions that are associated with cancer or hyperplasia. In some embodiments, provided technologies are useful for preventing and treating conditions, disorders or diseases whose prevention and/or treatment will benefits from inhibition of beta-catenin. In some embodiments, a condition, disorder or disease is cancer.

[0184] Beta-catenin is reported to have various functions. For example, it can regulate and coordinate transcription of various genes. It is reported that high beta-catenin activity and/or expression levels may contribute to the development various conditions, disorders or diseases including cancer. Mutations and overexpression of beta-catenin are reported to be associated with conditions, disorders or diseases including many cancers including colorectal cancer, lung cancer, and breast cancer. Dysregulation of the Wnt/β-catenin signaling pathway has reportedly been linked to a number of conditions, disorders or diseases, including neurodegenerative diseases, psychiatric diseases, cancers, asthma, and even wound healing. An abundance of published research, both clinical and preclinical, has indicated that hyperactivated Wnt/beta-catenin activity drives tumorigenesis and is required for tumor maintenance in various cancers. Many Wnt inhibitors largely modulate this pathway at the extracellular ligand/receptor level, e.g., by preventing Wnt ligand secretion or by blocking Wnt ligand interaction with its receptors at the plasma membrane. It has been reported that many activating Wnt pathway mutations are found in APC and/or CTNNB1, which are downstream of membrane-proximal events. Among other things, the present disclosure encompasses the recognition that many agents at the extracellular ligand/receptor level are insufficient to treat many relevant patients, e.g., those with downstream mutations/abnormalities. In some embodiments, Wnt pathway-activating mutations converge on beta-catenin/TCF node. In some embodiments, the present disclosure targets beta-catenin/TCF interaction, e.g., as a therapeutic approach. Agents that can modulate beta-catenin functions are useful for various purposes including preventing and/or treating various conditions, disorders or diseases associated with beta-catenin.

[0185] In some embodiments, beta-catenin is in a mutant form which comprises one or more mutations. In some embodiments, a mutant form is associated with a condition, disorder or disease. For example, in some embodiments, a mutation is D32V. In some embodiments, a mutation is D32H. In some embodiments, a mutation is S45F. In some embodiments, a mutation is S37C. In some embodiments, an associated condition, disorder or disease is cancer, e.g., hepatocellular cancer.

### Binding Sites

[0186] Beta-catenin may interact with various agents at various binding sites each independently comprising a set of amino acid residues that interact with binding agents. For example, certain binding sites are utilized for beta-catenin interactions with Axin, APC, C-cadherin, E-cadherin, TCF3, and Bcl9. For interactions with TCF3, it has been reported that two or more binding sites may be utilized simultaneously to interact with different portions of TCF3. See, e.g., Graham et al. Cell, Vol. 103, 885-896, 2000.

[0187] In some embodiments, provided agents bind to beta-catenin at a unique binding site. In some embodiments, provided agents interact with beta-catenin at a set of amino acid residues that are different from previously reported binding sites, e.g., those for Axin, APC, C-cadherin, E-cadherin, TCF3 or Bcl9.

[0188] For example, in some embodiments, provided agents interact with one or more or all (e.g., about 1-23, 1-20, 1-15, 1-10, 1-5, 5-23, 5-20, 5-15, 5-10, 6-23, 6-20, 6-15, 6-10, 7-23, 7-20, 7-15, 7-10, 8-23, 8-20, 8-15, 8-10, 9-23, 9-20, 9-15, 9-10, 10-23, 10-20, 10-15, 11-23, 11-20, 11-15, 12-23, 12-20, 12-15, 13-23, 13-20, 13-15, 13-23, 14-20, 15-23, 15-20, 16-23, 16-20, 17-23, 17-20, 18-23, or 18-20, or about 1, 2, 3, 4, 5, 6, 7, 8, 9, 10, 11, 12, 13, 14, 15, 16, 17, 18, 19, 20, 21, 22, or 23, etc.) of a set of amino acid residues that are or correspond to amino acid residues in SEQ ID NO: 1, e.g., in some embodiments, the following amino acid residues of SEQ ID NO: 1: A305, Y306, G307, N308, Q309, K312, R342, K345, V346, V349, Q375, R376, Q379, N380, L382, W383, R386, N387, D413, N415, V416, T418, and C₄₁₉. In some embodiments, a set of amino acid residues are or correspond to amino acid residues A305, Y306, G307, N308, Q309, K312, R342, K345, V346, V349, Q375, Q379, N380, L382, W383, R386, N387, D413, N415, V416, T418, and C419 of SEQ ID NO: 1. In some embodiments, a set of amino acid residues are or correspond to amino acid residues A305, Y306, G307, N308, Q309, K312, K345, V346, V349, Q379, N380, L382, W383, R386, N387, D413, N415, V416, T418, and C419 of SEQ ID NO: 1. In some embodiments, a set of amino acid residues are or correspond to amino acid residues G307, K312, K345, W383, N387, D413, and N415 of SEQ ID NO: 1. In some embodiments, a set of amino acid residues are or correspond to amino acid residues G307, K312, K345, Q379, L382, W383, N387, N415 and V416 of SEQ ID NO: 1. In some embodiments, a set of amino acid residues are or correspond to amino acid residues Y306, G307, K312, K345, Q379, L382, W383, N387, N415 and V416 of SEQ ID NO: 1. In some embodiments, a set of amino acid residues are or correspond to amino acid residues G307, K312, K345, Q379, L382, W383, R386, N387, N415 and V416 of SEQ ID NO: 1. In some embodiments, a set of amino acid residues are or correspond to amino acid residues Y306, G307, K312, K345, Q379, L382, W383, R386, N387, N415 and V416 of SEQ ID NO: 1. In some embodiments, a set of amino acid residues are or correspond to amino acid residues Y306, G307, K312, K345, V349, Q379, L382, W383, N387, N415 and V416 of SEQ ID NO: 1. In some embodiments, a set of amino acid residues are or correspond to amino acid residues Y306, G307, K312, K345, V349, Q379, L382, W383, R386, N387, N415 and V416 of SEQ ID NO: 1. In some embodiments, a set of amino acid residues are or correspond to amino acid residues G307, K312, K345, W383, and N387 of SEQ ID NO: 1. In some embodiments, a set of amino acid residues are or correspond to amino acid residues Y306, G307, K312, R386 and N387 of SEQ ID NO: 1. In some embodiments, provided agents interact with Y306 or an amino acid residue corresponding thereto. In some embodiments, provided agents interact with G307 or an amino acid residue corresponding thereto. In some embodiments, provided agents interact with K312 or an amino acid residue corresponding thereto. In some embodiments, provided agents interact with K345 or an amino acid residue corresponding thereto. In some embodiments, provided agents interact with V349 or an amino acid residue corresponding thereto. In some embodiments, provided agents interact with Q379 or an amino acid residue corresponding thereto. In some embodiments, provided agents interact with L382 or an amino acid residue corresponding thereto. In some embodiments, provided agents interact with W383 or an amino acid residue corresponding thereto. In some embodiments, provided agents interact with R386 or an amino acid residue corresponding thereto. In some embodiments, provided agents interact with N387 or an amino acid residue corresponding thereto. In some embodiments, provided agents interact with N415 or an amino acid residue corresponding thereto. In some embodiments, provided agents interact with V416 or an amino acid residue corresponding thereto.

[0189] In some embodiments, a present agent interacts with a polypeptide whose sequence corresponds to aa 146-aa665 of human beta-catenin. In some embodiments, a present agent interacts with a polypeptide whose sequence comprises or is SEQ ID NO: 2:

(SEQ ID NO: 2)
SVLFYAITTLHNLLLHQEGAKMAVRLAGGLQKMVALLNKTNVKFL
AITTDCLQILAYGNQESKLIILASGGPQALVNIMRTYTYEKLLWT
TSRVLKVLSVCSSNKPAIVEAGGMQALGLHLTDPSQRLVQNCLWT
LRNLSDAATKQEGMEGLLGTLVQLLGSDDINVVTCAAGILSNLTC
NNYKNKMMVCQVGGIEALVRT.

[0190] In some embodiments, all amino acid residues that interact with a provided agent is with SEQ ID NO: 2. In some embodiments, amino acid residues that interact with a provided agent (e.g., one or more amino acid residues in an agent) interacts with an agent through hydrogen bonding, hydrophobic interactions or salt bridge. As appreciated by those skilled in the art, when two amino acid residues interacting with each other, they are typically within a certain range of distances when, e.g., assessed using crystallography, NMR, etc.

[0191] In some embodiments, certain amino acid residues reported to interact with one or more polypeptides are not significantly involved in interactions between provided and beta-catenin. In some embodiments, provided agents do not interact with an Axin binding site. In some embodiments, provided agents do not interact with a Bc19 binding site. In some embodiments, provided agents do not interact with one or more or all of amino acid residues that are or correspond to N426, C429, K435, R469, H470, S473, R474, K508 and N516 of SEQ ID NO: 1. In some embodiments, provided agents do not interact with N426 or an amino acid residue corresponding thereto. In some embodiments, provided agents do not interact with C429 or an amino acid residue corresponding thereto. In some embodiments, provided agents do not interact with K435 or an amino acid residue corresponding thereto. In some embodiments, provided agents do not interact with R469 or an amino acid residue corresponding thereto. In some embodiments, provided agents do not interact with H470 or an amino acid residue corresponding thereto. In some embodiments, provided agents do not interact with S473 or an amino acid residue corresponding thereto. In some embodiments, provided agents do not interact with R474 or an amino acid residue corresponding thereto. In some embodiments, provided agents do not interact with K508 or an amino acid residue corresponding thereto. In some embodiments, provided agents do not interact with N516 or an amino acid residue corresponding thereto.

[0192] In some embodiments, mutation of one or more amino acid residues outside of SEQ ID NO: 2 in beta-catenin does not significantly (e.g., not exceeding 30%, 40%, 50%, 60%, 70%, 75%, 80%, 85%, 90% or more) reduce interactions of beta-catenin with a provided agent. In some embodiments, mutation of one or more or all of amino acid residues that are or correspond to N426, C429, K435, R469, H470, S473, R474, K508 and N516 of SEQ ID NO: 1 does not significantly reduce interactions of beta-catenin with a provided agent. In some embodiments, mutation of N426 or an amino acid residue corresponding thereto does not significantly reduce interaction of beta-catenin with an agent. In some embodiments, mutation of Q379 or an amino acid residue corresponding thereto (e.g., to Ala, Glu, Phe, Trp, etc.) does not significantly reduce interaction of beta-catenin with an agent.

[0193] In some embodiments, an agent binds to a TCF site of beta-catenin. In some embodiments, an agent interacts with one or more but not all amino acid residues that interact with TCF. In some embodiments, an agent interacts with one or more but not all amino acid residues that interact with an extended region of XTcf3-CBD. In some embodiments, an agent does not interact with beta-catenin amino acid residues that interact with a beta-hairpin module of XTcf3-CBD. In some embodiments, an agent does not interact with beta-catenin amino acid residues that interact with a helix module of XTcf3-CBD. For certain amino acid residues that interact various modules of XTcF3-CBD, see, e.g., Graham et al. Cell, Vol. 103, 885-896, 2000.

[0194] In some embodiments, an agent competes with TCF for beta-catenin binding. In some embodiments, an agent competes with an extended region of TCF (e.g., Ala14-Glu24, or Asp16-Glu24, as described in Graham et al. Cell, Vol. 103, 885-896, 2000) for beta-catenin binding. In some embodiments, compared to an extended region of TCF, an agent does not compete, or competes at a less degree, with Axin for beta-catenin binding. In some embodiments, compared to an extended region of TCF, an agent does not compete, or competes at a less degree, with Bc19 for beta-catenin binding. In some embodiments, compared to an extended region of TCF, an agent does not compete, or competes at a less degree, with a beta-hairpin module of XTcf3-CBD for beta-catenin binding. In some embodiments, compared to an extended region of TCF, an agent does not compete, or competes at a less degree, with a helix module of XTcf3-CBD for beta-catenin binding. In some embodiments, an agent competes with E-cadherin for beta-catenin binding.

[0195] In some embodiments, the present disclosure provides complexes of peptides (e.g., polypeptides whose sequences are or comprises SEQ ID NO: 1 or 2) and provided agents. In some embodiments, in such complexes polypeptides and provided agents interact with one or more or all amino acid residues as described herein, and optionally do not interact with one or more or all amino acid residues as described herein.

[0196] In some embodiments, the present disclosure provides complexes comprising a provided agent and a beta-catenin polypeptide or a portion thereof. In some embodiments, a portion thereof comprises one or more or all of the interacting residues as described herein. In some embodiments, an agent and a beta-catenin polypeptide or a portion thereof interact with other at one or more or all of the interacting residues.

### Certain Agents

[0197] In some embodiments, the present disclosure provides an agent having the structure of formula I:

or a salt thereof, wherein:
[0198] R^{N} is a peptide, an amino protecting group or R′-L^{RN}-;
[0199] each of L^{P1}, L^{P2}, L^{P3}, L^{P4}, L^{P5}, L^{P6}, and L^{P7} is independently L, wherein L^{P1}, L^{P2}, L^{P3}, L^{P4}, L^{P5}, L^{P6}, and L^{P7} comprise:
   [0200] a first R′ group and a second R′ group which are taken together to form -L^{s}- which is bonded to the atom to which a first R′ group is attached and the atom to which a second R′ group is attached; and
   [0201] a third R′ group and a fourth R′ group which are taken together to form -L^{s}- which is bonded to the atom to which a third R′ group is attached and the atom to which a fourth R′ group is attached;
[0202] each L^{s} is independently -L^{s1}-L^{s2}-L^{s3}-, wherein each L^{s1}, L^{s2} and L^{s3} is independently L;
[0203] L^{AA1} is an amino acid residue that comprises a side chain comprising an acidic or polar group;
[0204] L^{AA2} is an amino acid residue that comprises a side chain comprising an acidic or polar group;
[0205] L^{AA3} is an amino acid residue;
[0206] L^{AA4} is an amino acid residue that comprises a side chain comprising an optionally substituted aromatic group;
[0207] L^{AA5} is an amino acid residue that comprises a side chain comprising an optionally substituted aromatic group;
[0208] L^{AA6} is an amino acid residue that comprises a side chain comprising an optionally substituted aromatic group;
[0209] R^{C} is a peptide, a carboxyl protecting group, -L^{RC}-R′, —O-L^{RC}-R′ or —N(R′)-L^{RC}-R′; each of L^{RN} and L^{RC} is independently L;
[0210] each L is independently a covalent bond, or an optionally substituted, bivalent C₁-C₂₅ aliphatic or heteroaliphatic group having 1-10 heteroatoms, wherein one or more methylene units of the group are optionally and independently replaced with —C(R′)₂—, -Cy-, —O—, —S—, —S—S—, —N(R′)—, —C(O)—, —C(S)—, —C(NR′)—, —C(O)N(R′)—, —N(R′)C(O)N(R′)—, —N(R′)C(O)O—, —S(O)—, —S(O)₂—, —S(O)₂N(R′)—, —C(O)S—, or —C(O)O—;
[0211] each -Cy- is independently an optionally substituted bivalent, 3-30 membered, monocyclic, bicyclic or polycyclic ring having 0-10 heteroatoms;
[0212] each R′ is independently -L-R, —C(O)R, —CO₂R, or —SO₂R;
[0213] each R is independently —H, or an optionally substituted group selected from C₁₋₃₀ aliphatic, C₁₋₃₀ heteroaliphatic having 1-10 heteroatoms, C₆₋₃₀ aryl, C₆₋₃₀ arylaliphatic, C₆₋₃₀ arylheteroaliphatic having 1-10 heteroatoms, 5-30 membered heteroaryl having 1-10 heteroatoms, and 3-30 membered heterocyclyl having 1-10 heteroatoms, or
[0214] two R groups are optionally and independently taken together to form a covalent bond, or:
[0215] two or more R groups on the same atom are optionally and independently taken together with the atom to form an optionally substituted, 3-30 membered, monocyclic, bicyclic or polycyclic ring having, in addition to the atom, 0-10 heteroatoms; or
[0216] two or more R groups on two or more atoms are optionally and independently taken together with their intervening atom(s) to form an optionally substituted, 3-30 membered, monocyclic, bicyclic or polycyclic ring having, in addition to the intervening atom(s), 0-10 heteroatoms.

[0217] In some embodiments, the present disclosure provides an agent having the structure of formula I:

or a salt thereof, wherein:
[0218] R^{N} is a peptide, an amino protecting group or R′-L^{RN}-;
[0219] each of L^{P1}, L^{P2}, L^{P3}, L^{P4}, L^{P5}, L^{P6}, and L^{P7} is independently L, wherein L^{P1}, L^{P2}, L^{P3}, L^{P4}, L^{P5}, L^{P6}, and L^{P7} comprise:
   [0220] a first R′ group and a second R′ group which are taken together to form -L^{s}- which is bonded to the atom to which a first R′ group is attached and the atom to which a second R′ group is attached; and
   [0221] a third R′ group and a fourth R′ group which are taken together to form -L^{s}- which is bonded to the atom to which a third R′ group is attached and the atom to which a fourth R′ group is attached;
[0222] each L^{s} is independently -L^{s1}-L^{s2}-L^{s3}-, wherein each L^{s1}, L^{s2} and L^{s3} is independently L;
[0223] L^{AA1} is L^{AR}, wherein a methylene unit is replaced with —C(R′)(R^{AS})—, wherein R^{AS} is -L^{AS1}-R^{AA1}, wherein R^{AA1} is —CO₂R or —SO₂R;
[0224] L^{AA2} is L^{AR}, wherein a methylene unit is replaced with —C(R′)(R^{AS})—, wherein R^{AS} is -L^{AS2}-R^{AA2}, wherein R^{AA2} is —CO₂R or —SO₂R;
[0225] L^{AA3} is L^{AR}, wherein a methylene unit is replaced with —C(R′)(R^{AS})—, wherein R^{AS} is -L^{AS3}-R^{AA3}, wherein R^{AA3} is R′;
[0226] L^{AA4} is L^{AR}, wherein a methylene unit is replaced with —C(R′)(R^{AS})—, wherein R^{AS} is -L^{AS4}-R^{AA4}, wherein R^{AA4} is an optionally substituted group selected from 6-14 membered aryl or 5-14 membered heteroaryl having 1-6 heteroatoms;
[0227] L^{AA5} is L^{AR}, wherein a methylene unit is replaced with —C(R′)(R^{AS})—, wherein R^{AS} is -L^{AS5}-R^{AA5}, wherein R^{AA5} is an optionally substituted group selected from 6-14 membered aryl or 5-14 membered heteroaryl having 1-6 heteroatoms;
[0228] L^{AA6} is L^{AR}, wherein a methylene unit is replaced with —C(R′)(R^{AS})—, wherein R^{AS} is -L^{AS6}-R^{AA6}, wherein R^{AA6} is an optionally substituted group selected from 6-14 membered aryl or 5-14 membered heteroaryl having 1-6 heteroatoms;
[0229] R^{C} is a peptide, a carboxyl protecting group, -L^{RC}-R′, —O-L^{RC}-R′ or —N(R′)-L^{RC}-R′;
[0230] each of L^{RN} and L^{RC} is independently L;
[0231] each L^{AR} is independently an optionally substituted, bivalent C₁-C₄ aliphatic group, wherein one or more methylene units of the group are optionally and independently replaced with —C(R′)₂—, —C(R′)(R^{AS})—, -Cy-, —O—, —S—, —S—S—, —N(R′)—, —C(O)—, —C(S)—, —C(NR′)—, —C(O)N(R′)—, —N(R′)C(O)N(R′)—, —N(R′)C(O)O—, —S(O)—, —S(O)₂—, —S(O)₂N(R′)—, —C(O)S—, or —C(O)O—;
[0232] each of L^{AS1}, L^{AS2}, L^{AS3}, L^{AS4}, LASS, and L^{AS6} is independently L^{AS};
[0233] each R^{AS} is independently -L^{AS}-R′;
[0234] each L^{AS} is independently an optionally substituted, bivalent C₁-C₁₀ aliphatic or heteroaliphatic group having 1-5 heteroatoms, wherein one or more methylene units of the group are optionally and independently replaced with —C(R′)₂—, -Cy-, —O—, —S—, —S—S—, —N(R′)—, —C(O)—, —C(S)—, —C(NR′)—, —C(O)N(R′)—, —N(R′)C(O)N(R′)—, —N(R′)C(O)O—, —S(O)—, —S(O)₂—, —S(O)₂N(R′)—, —C(O)S—, or —C(O)O—;
[0235] each L is independently a covalent bond, or an optionally substituted, bivalent C₁-C₂₅ aliphatic or heteroaliphatic group having 1-10 heteroatoms, wherein one or more methylene units of the group are optionally and independently replaced with —C(R′)₂—, -Cy-, —O—, —S—, —S—S—, —N(R′)—, —C(O)—, —C(S)—, —C(NR′)—, —C(O)N(R′)—, —N(R′)C(O)N(R′)—, —N(R′)C(O)O—, —S(O)—, —S(O)₂—, —S(O)₂N(R′)—, —C(O)S—, or —C(O)O—;
[0236] each -Cy- is independently an optionally substituted bivalent, 3-30 membered, monocyclic, bicyclic or polycyclic ring having 0-10 heteroatoms;
[0237] each R′ is independently -L-R, —C(O)R, —CO₂R, or —SO₂R;
[0238] each R is independently —H, or an optionally substituted group selected from C₁₋₃₀ aliphatic, C₁₋₃₀ heteroaliphatic having 1-10 heteroatoms, C₆₋₃₀ aryl, C₆₋₃₀ arylaliphatic, C₆₋₃₀ arylheteroaliphatic having 1-10 heteroatoms, 5-30 membered heteroaryl having 1-10 heteroatoms, and 3-30 membered heterocyclyl having 1-10 heteroatoms, or
[0239] two R groups are optionally and independently taken together to form a covalent bond, or:
[0240] two or more R groups on the same atom are optionally and independently taken together with the atom to form an optionally substituted, 3-30 membered, monocyclic, bicyclic or polycyclic ring having, in addition to the atom, 0-10 heteroatoms; or
[0241] two or more R groups on two or more atoms are optionally and independently taken together with their intervening atom(s) to form an optionally substituted, 3-30 membered, monocyclic, bicyclic or polycyclic ring having, in addition to the intervening atom(s), 0-10 heteroatoms.

[0242] In some embodiments, a compound of formula I is a stapled peptide as described herein.

[0243] Various agents, including embodiments for various variables, e.g., R′, R, R^{N}, L^{P1}, L^{AA1}, L^{P2}, L^{AA2}, L^{P3}, L^{AA3}, L^{P4}, L^{AA4}, L^{P5}, L^{AA5}, L^{P6}, L^{AA6}, L^{P7}, R^{C}, L^{AS}, etc., are described in WO 2022/261257 and incorporated herein by reference.

[0244] For example, in some embodiments, L^{P1} is or comprises -[X]ₚ-X¹—, wherein each of p, X and X¹ is independently as described herein, and X¹ is bonded to L^{AA1}. In some embodiments, L^{P1} is or comprises —X¹—. In some embodiments, such a carbon atom is an alpha carbon of an amino acid residue. In some embodiments, L^{AA1} is X² as described herein. In some embodiments, L^{P2} is or comprises -[X]pX⁴[X]p′-, wherein each of p, p′, X and X⁴ is independently as described herein. In some embodiments, L^{P2} is or comprises -[X]pX³X⁴[X]p′-, wherein each X, X³ and X⁴ is independently an amino acid residue, and each of p and p′ is independently 0-10. In some embodiments, L^{P2} is or comprises —X³X⁴—, wherein each X³ and X⁴ is independently as described herein, and X⁴ is bonded to L^{AA2}. In some embodiments, L^{AA2} is X⁵ as described herein. In some embodiments, L″3 is or comprises -[X]pX⁶X⁷[X]p′-, wherein each X, X⁶ and X⁷ is independently an amino acid residue, and each of p and p′ is independently 0-10. In some embodiments, L^{P3} is or comprises —X⁶X⁷—, wherein each X⁶ and X⁷ is independently an amino acid residue. In some embodiments, L^{AA3} is X⁸ as described herein. In some embodiments, L^{P4} is or comprises -[X]pX⁷X⁸[X]p′-, wherein each X, X⁷ and X⁸ is independently an amino acid residue, and each of p and p′ is independently 0-10. In some embodiments, L^{P4} is or comprises —X⁷X⁸—, wherein each X⁷ and X⁸ is independently as described herein, and X⁸ is bonded to L^{AA4}. In some embodiments, L^{AA4} is X⁹ as described herein. In some embodiments, L^{P5} is or comprises -[X]pX¹¹[X]p′-, wherein each variable is independently as described herein. In some embodiments, L^{P5} is or comprises —X¹⁰X¹¹—, wherein each X¹⁰ and X¹¹ is independently as described herein, and X¹¹ is bonded to LAAS. In some embodiments, L^{AA5} is or comprises amino acid residue. In some embodiments, L^{AA5} is or comprises an amino acid residue that comprises a side chain comprising an aromatic group. In some embodiments, L^{AA5} is X¹² as described herein. In some embodiments, L^{P6} is or comprises an amino acid residue. In some embodiments, L^{P6} is or comprises a peptide. In some embodiments, L^{AA6} is X¹³ as described herein. In some embodiments, L^{P7} is or comprises —X¹⁴—[X]p′-, wherein p′ is 0-10. In some embodiments, X¹⁴ is bonded to L^{AA6}

[0245] In some embodiments, an agent of formula I is a stapled peptide as described herein. In some embodiments, an agent of formula I is an agent selected from Table E2 or a pharmaceutically acceptable salt thereof. In some embodiments, an agent of formula I is an agent selected from Table E3 or a pharmaceutically acceptable salt thereof.

[0246] Among other things, the present disclosure provides agents, e.g. peptides, that can bind to beta-catenin. In some embodiments, an agent is or comprises X¹X²X³X⁴X⁵X⁶X⁷X⁸X⁹X¹⁰X¹¹X¹²X¹³X¹⁴ wherein each of X¹, X², X³, X⁴, X⁵, X⁶, X⁷, X⁸, X⁹, X¹⁰, X¹¹, X¹², X¹³ and X¹⁴ is independently an amino acid residue. In some embodiments, an agent is or comprises [X⁰]ₚ₀X¹X²X³X⁴X⁵X⁶X⁷X⁸X⁹X¹⁰X¹¹X¹²X¹³X¹⁴[X¹⁵]ₚ₁₅[X¹⁶]ₚ₁₆[X¹⁷]ₚ₁₇, wherein each of p0, p15, p16 and p17 is independently 0 or 1, and each of X⁰, X¹, X², X³, X⁴, X⁵, X⁶, X⁷, X⁸, X⁹, X¹⁰, X¹¹, X¹², X¹³, X¹⁴, X¹⁵, X¹⁶, and X¹⁷ is independently an amino acid residue.

[0247] Various amino acid residues, e.g., those of formula A-I, A-II, A-III, A-IV, A-V, A-VI, PA, etc., can be utilized in accordance with the present disclosure. Certain useful amino acid residues are described in the present disclosure.

[0248] In some embodiments, each of X² and X⁵ is independently an acidic residue as described herein. In some embodiments, each of X², X⁵ and X⁶ is independently an acidic residue as described herein. In some embodiments, each of X⁹, X¹² and X¹³ are independently an amino acid residue comprising a side chain that comprises an aromatic group.

[0249] In some embodiments, X² is an acidic residue. In some embodiments, X² comprises a side chain that comprises —COOH or a derivative thereof. In some embodiments, X² comprises a side chain that comprises —COOH. In some embodiments, X² is Asp. Various other amino acid residues for X² are described else in the present disclosure.

[0250] In some embodiments, X⁵ is an acidic residue. In some embodiments, X⁵ comprises a side chain that comprises —COOH or a derivative thereof. In some embodiments, X⁵ comprises a side chain that comprises —COOH. In some embodiments, X⁵ is Asp. Various other amino acid residues for X⁵ are described else in the present disclosure.

[0251] In some embodiments, X⁶ is an acidic residue. In some embodiments, X⁶ comprises a side chain that comprises —COOH or a derivative thereof. In some embodiments, X⁶ comprises a side chain that comprises —COOH. In some embodiments, X⁶ is Asp. Various other amino acid residues for X⁶ are described else in the present disclosure.

[0252] In some embodiments, X⁹ comprises a side chain that comprises an aromatic group. In some embodiments, X⁹ comprises a side chain that comprises -R, wherein R is an optionally substituted group selected from phenyl, 10-membered bicyclic aryl, 5-membered heteroaryl having 1-3 hetereoatoms, and 9-10 membered bicyclic heteroaryl having 1-5 heteroatoms. In some embodiments, each heteroatom is independently sleeved from nitrogen, oxygen and sulfur. In some embodiments, X⁹ is Phe. Various other amino acid residues for X⁹ are described else in the present disclosure.

[0253] In some embodiments, X¹² comprises a side chain that comprises an aromatic group. In some embodiments, X¹² comprises a side chain that comprises -R, wherein R is an optionally substituted group selected from phenyl, 10-membered bicyclic aryl, 5-membered heteroaryl having 1-3 hetereoatoms, and 9-10 membered bicyclic heteroaryl having 1-5 heteroatoms. In some embodiments, each heteroatom is independently sleeved from nitrogen, oxygen and sulfur. In some embodiments, X¹² is 3Thi. In some embodiments, X¹² is 2F3McF. In some embodiments, X¹² is Phe. Various other amino acid residues for X¹² are described else in the present disclosure.

[0254] In some embodiments, X¹³ comprises a side chain that comprises an aromatic group. In some embodiments, X¹³ comprises a side chain that comprises -R, wherein R is an optionally substituted group selected from phenyl, 10-membered bicyclic aryl, 5-membered heteroaryl having 1-3 hetereoatoms, and 9-10 membered bicyclic heteroaryl having 1-5 heteroatoms. In some embodiments, each heteroatom is independently sleeved from nitrogen, oxygen and sulfur. In some embodiments, X¹³ is BtzA. In some embodiments, X¹³ is 34CIF. In some embodiments, X¹³ is 2NapA. Various other amino acid residues for X¹³ are described else in the present disclosure.

[0255] As described herein, in some embodiments, a peptide is a stapled peptide. In some embodiments, an agent is or comprises a peptide, wherein a peptide is a stapled peptide. In some embodiments, a peptide is a stitched peptide. In some embodiments, a peptide comprises three or more staples as described herein. In some embodiments, a peptide comprises three or more staples within a region having a length of, e.g., 11-15, such as 11, 14, etc., amino acid residues as described herein. In some embodiments, such a peptide provides improved rigidity, activity, delivery, solubility, and/or other desired properties comprising a reference peptide that is not stapled or that comprises fewer staples.

[0256] In some embodiments, the present disclosure provides an agent, e.g., a peptide, comprising X¹X²X³X⁴X⁵X⁶X⁷X⁸X⁹X¹⁰X¹¹X¹²X¹³X¹⁴, wherein X¹, X², X³, X⁴, X⁵, X⁶, X⁷, X⁸, X⁹, X¹⁰, X¹¹, X¹², X¹³, and X¹⁴ are each independently an amino acid residue and comprises two or more pairs of amino acid residues, wherein each pair of amino acid residues are independently two amino acid residues suitable for stapling or stapled. In some embodiments, the present disclosure provides an agent, e.g., a peptide, comprising X¹X²X³X⁴X⁵X⁶X⁷X⁸X⁹X¹⁰X¹¹X¹²X¹³X¹⁴, wherein X¹, X², X³, X⁴, X⁵, X⁶, X⁷, X⁸, X⁹, X¹⁰, X¹¹, X¹², X¹³, and X¹⁴ are each independently an amino acid residue and comprises two or more pairs of amino acid residues, wherein each pair of amino acid residues are independently three amino acid residues suitable for stapling or stapled.

[0257] In some embodiments, the present disclosure provides an agent, e.g., a peptide, comprising [X⁰]ₚ₀X¹X²X³X⁴X⁵X⁶X⁷X⁸X⁹X¹⁰X¹¹X¹²X¹³X¹⁴[X¹⁵]ₚ₁₅[X¹⁶]ₚ₁₆[X¹⁷]ₚ₁₇, wherein each of p0, p15, p16 and p17 is independently 0 or 1, and X⁰, X¹, X², X³, X⁴, X⁵, X⁶, X⁷, X⁸, X⁹, X¹⁰, X¹¹, X¹², X¹³, X¹⁴, X¹⁵, X¹⁶, and X¹⁷ are each independently an amino acid residue and comprises two or more pairs of amino acid residues, wherein each pair of amino acid residues are independently two amino acid residues suitable for stapling or stapled. In some embodiments, the present disclosure provides an agent, e.g., a peptide, comprising [X⁰]ₚ₀X¹X²X³X⁴X⁵X⁶X⁷X⁸X⁹X¹⁰X¹¹X¹²X¹³X¹⁴[X¹⁵]ₚ₁₅[X¹⁶]ₚ₁₆[X¹⁷]ₚ₁₇, wherein each of p0, p15, p16 and p17 is independently 0 or 1, and X⁰, X¹, X², X³, X⁴, X⁵, X⁶, X⁷, X⁸, X⁹, X¹⁰, X¹¹, X¹², X¹³, X¹⁴, X¹⁵, X¹⁶, and X¹⁷ are each independently an amino acid residue and comprises three or more pairs of amino acid residues, wherein each pair of amino acid residues are independently two amino acid residues suitable for stapling or stapled. In some embodiments, each amino acid residue in such pairs of amino acid residues are independently selected from X¹, X², X³, X⁴, X⁵, X⁶, X⁷, X⁸, X⁹, X¹⁰, X¹¹, X¹², X¹³, and X¹⁴.

[0258] In some embodiments, there are three such pairs of amino acid residues. In some embodiments, there are four such pairs of amino acid residues. In some embodiments, there are four or more such pairs of amino acid residues. In some embodiments, each pair is independently not stapled. In some embodiments, one or more pairs are independently stapled. In some embodiments, two or more pairs are independently stapled. In some embodiments, three or more pairs are independently stapled. In some embodiments, four or more pairs are independently stapled. In some embodiments, two pairs are independently stapled. In some embodiments, three pairs are independently stapled. In some embodiments, four pairs are independently stapled.

[0259] In some embodiments, a pair is X¹ and X⁴. In some embodiments, a pair is X⁴ and X¹¹. In some embodiments, a pair is X¹ and X³. In some embodiments, a pair is X⁴ and X¹¹. In some embodiments, a pair is X¹⁰ and X¹⁴. In some embodiments, a pair is X⁷ and X¹⁰. In some embodiments, a pair is X⁷ and X¹⁴. In some embodiments, a pair is X³ and X⁷.

[0260] In some embodiments, a pair is X¹ and X¹⁴ and a pair is X⁴ and X¹¹. In some embodiments, a pair is X¹ and X¹⁴, a pair is X⁴ and X¹¹ and a pair is X¹⁰ and X¹⁴. In some embodiments, a pair is X¹ and X¹⁴, a pair is X⁴ and X¹¹ and a pair is X⁷ and X¹⁰. In some embodiments, a pair is X¹ and X¹⁴, a pair is X⁴ and X¹¹ and a pair is X⁷ and X¹⁴. In some embodiments, a pair is X¹ and X¹⁴, a pair is X⁴ and X¹¹, a pair is X³ and X⁷, and a pair is X⁷ and X¹⁴. In some embodiments, each pair is independently a pair of amino acid residues suitable for stapling. In some embodiments, each pair is independently stapled.

[0261] In some embodiments, a pair is X¹ and X³, a pair is X⁴ and X¹¹, and a pair is X¹⁰ and X¹⁴. In some embodiments, each pair is independently a pair of amino acid residues suitable for stapling. In some embodiments, each pair is independently stapled.

[0262] In some embodiments, the present disclosure provides an agent, which is or comprises a peptide comprising:

wherein:
[0263] each of p0, p15, p16 and p17 is independently 0 or 1;
[0264] each of X⁰, X¹, X², X³, X⁴, X⁵, X⁶, X⁷, X⁸, X⁹, X¹⁰, X¹¹, X¹², X¹³, X¹⁴, X¹⁵, X¹⁶, and X¹⁷ is independently an amino acid residue, wherein the agent binds to beta-catenin.

[0265] In some embodiments, X² comprises a side chain comprising an acidic or a polar group. In some embodiments, X² comprises a side chain comprising an acidic group. In some embodiments, X² comprises a side chain comprising a polar group. In some embodiments, X⁵ comprises a side chain comprising an acidic or a polar group. In some embodiments, X⁵ comprises a side chain comprising an acidic group. In some embodiments, X⁵ comprises a side chain comprising a polar group. In some embodiments, X¹³ comprises a side chain comprising an optionally substituted aromatic group. In some embodiments, two or more of X¹, X³, X⁴, X⁷, X¹⁰, X¹¹ and X¹⁴ are each independently an amino acid residue suitable for stapling, or are each independently stapled.

[0266] In some embodiments, the present disclosure provides an agent, which is or comprises a peptide comprising:

wherein:
[0267] each of p0, p15, p16 and p17 is independently 0 or 1;
[0268] each of X⁰, X¹, X², X³, X⁴, X⁵, X⁶, X⁷, X⁸, X⁹, X¹⁰, X¹¹, X¹², X¹³, X¹⁴, X¹⁵, X¹⁶, and X¹⁷ is independently an amino acid residue, wherein:
[0269] X² comprises a side chain comprising an acidic or a polar group;
[0270] X⁵ comprises a side chain comprising an acidic or a polar group;
[0271] X¹³ comprises a side chain comprising an optionally substituted aromatic group; and
[0272] two or more of X¹, X³, X⁴, X⁷, X¹⁰, X¹¹ and X¹⁴ are each independently an amino acid residue suitable for stapling, or are each independently stapled. In some embodiments, three or more of X¹, X³, X⁴, X⁷, X¹⁰, X¹¹ and X¹⁴ are each independently an amino acid residue suitable for stapling, or are each independently stapled. In some embodiments, four or more of X¹, X³, X⁴, X⁷, X¹⁰, X¹¹ and X¹⁴ are each independently an amino acid residue suitable for stapling, or are each independently stapled. In some embodiments, five of X¹, X³, X⁴, X⁷, X¹⁰, X¹¹ and X¹⁴ are each independently an amino acid residue suitable for stapling, or are each independently stapled. In some embodiments, X¹ and X⁴ are each independently an amino acid residue suitable for stapling. In some embodiments, X¹ and X³ are each independently an amino acid residue suitable for stapling. In some embodiments, X⁴ and X¹¹ are each independently an amino acid suitable for stapling. In some embodiments, X¹, X⁴, and X¹¹ are each independently an amino acid residue suitable for stapling. In some embodiments, X¹⁰ and X¹⁴ are each independently an amino acid residue suitable for stapling. In some embodiments, X⁷ and X¹⁰ are each independently an amino acid residue suitable for stapling. In some embodiments, X⁷ and X¹⁴ are each independently an amino acid residue suitable for stapling. In some embodiments, X³ and X⁷ are each independently an amino acid residue suitable for stapling. In some embodiments, X¹ and X⁴ are connected by a staple. In some embodiments, X¹ and X³ are connected by a staple. In some embodiments, X⁴ and X¹¹ are connected by a staple. In some embodiments, X¹ and X⁴ connected by a staple, and X⁴ and X¹¹ are connected by a staple. In some embodiments, X¹⁰ and X¹⁴ are connected by a staple. In some embodiments, X⁷ and X¹⁰ are connected by a staple. In some embodiments, X⁷ and X¹⁴ are connected by a staple. In some embodiments, X³ and X⁷ are connected by a staple.

[0273] In some embodiments, the present disclosure provides an agent, which is or comprises a peptide comprising:

wherein:
[0274] each of p0, p15, p16 and p17 is independently 0 or 1;
[0275] each of X⁰, X¹, X², X³, X⁴, X⁵, X⁶, X⁷, X⁸, X⁹, X¹⁰, X¹¹, X¹², X¹³, X¹⁴, X¹⁵, X¹⁶, and X¹⁷ is independently an amino acid residue, wherein:
[0276] X² comprises a side chain comprising an acidic or a polar group;
[0277] X⁵ comprises a side chain comprising an acidic or a polar group;
[0278] X¹³ comprises a side chain comprising an optionally substituted aromatic group; and wherein:
[0279] X¹ and X⁴ are connected by a staple and/or X⁴ and X¹¹ are connected by a staple, and X¹⁰ and X¹⁴ are connected by a staple.

[0280] In some embodiments, the present disclosure provides an agent, which is or comprises a peptide comprising:

wherein:
[0281] each of p0, p15, p16 and p17 is independently 0 or 1;
[0282] each of X⁰, X¹, X², X³, X⁴, X⁵, X⁶, X⁷, X⁸, X⁹, X¹⁰, X¹¹, X¹², X¹³, X¹⁴, X¹⁵, X¹⁶, and X¹⁷ is independently an amino acid residue, wherein:
[0283] X² comprises a side chain comprising an acidic or a polar group;
[0284] X⁵ comprises a side chain comprising an acidic or a polar group;
[0285] X¹³ comprises a side chain comprising an optionally substituted aromatic group; and wherein:
[0286] X¹ and X⁴ are connected by a staple and/or X⁴ and X¹¹ are connected by a staple, and X⁷ and X¹⁰ are connected by a staple.

[0287] In some embodiments, the present disclosure provides an agent, which is or comprises a peptide comprising:

wherein:
[0288] each of p0, p15, p16 and p17 is independently 0 or 1;
[0289] each of X⁰, X¹, X², X³, X⁴, X⁵, X⁶, X⁷, X⁸, X⁹, X¹⁰, X¹¹, X¹², X¹³, X¹⁴, X¹⁵, X¹⁶, and X¹⁷ is independently an amino acid residue, wherein:
[0290] X² comprises a side chain comprising an acidic or a polar group;
[0291] X⁵ comprises a side chain comprising an acidic or a polar group;
[0292] X¹³ comprises a side chain comprising an optionally substituted aromatic group; and wherein:
[0293] X¹ and X⁴ are connected by a staple and/or X⁴ and X¹¹ are connected by a staple, and X⁷ and X¹⁴ are connected by a staple.

[0294] In some embodiments, the present disclosure provides an agent, which is or comprises a peptide comprising:

wherein:
[0295] each of p0, p15, p16 and p17 is independently 0 or 1;
[0296] each of X⁰, X¹, X², X³, X⁴, X⁵, X⁶, X⁷, X⁸, X⁹, X¹⁰, X¹¹, X¹², X¹³, X¹⁴, X¹⁵, X¹⁶, and X¹⁷ is independently an amino acid residue, wherein:
[0297] X² comprises a side chain comprising an acidic or a polar group;
[0298] X⁵ comprises a side chain comprising an acidic or a polar group;
[0299] X¹³ comprises a side chain comprising an optionally substituted aromatic group; and wherein:
[0300] X¹ and X⁴ are connected by a staple and/or X⁴ and X¹¹ are connected by a staple; and X¹⁰ and X¹⁴ are connected by a staple and/or X³ and X⁷ are connected by a staple.

[0301] In some embodiments, the present disclosure provides an agent, which is or comprises a peptide comprising:

wherein:
[0302] each of p0, p15, p16 and p17 is independently 0 or 1;
[0303] each of X⁰, X¹, X², X³, X⁴, X⁵, X⁶, X⁷, X⁸, X⁹, X¹⁰, X¹¹, X¹², X¹³, X¹⁴, X¹⁵, X¹⁶, and X¹⁷ is independently an amino acid residue, wherein:
[0304] X² comprises a side chain comprising an acidic or a polar group;
[0305] X⁵ comprises a side chain comprising an acidic or a polar group;
[0306] X¹³ comprises a side chain comprising an optionally substituted aromatic group; and wherein:
[0307] X¹ and X³ are connected by a staple, X⁴ and X¹¹ are connected by a staple; and X¹⁰ and X¹⁴ are connected by a staple.

[0308] In some embodiments, X² comprises a side chain comprising an acidic (e.g., —COOH) or a polar group. In some embodiments, X² comprises a side chain comprising an acid group. In some embodiments, X⁵ comprises a side chain comprising an acidic or a polar group. In some embodiments, X⁵ comprises a side chain comprising an acid group. In some embodiments, X⁶ comprises a side chain comprising an acidic or a polar group. In some embodiments, X⁶ comprises a side chain comprising an acid group. In some embodiments, X⁹ comprises a side chain comprising an optionally substituted aromatic group. In some embodiments, X¹² comprises a side chain comprising an optionally substituted aromatic group. In some embodiments, X¹³ comprises a side chain comprising an optionally substituted aromatic group. In some embodiments, X² and X⁵ each independently comprise a side chain comprising an acidic or a polar group. In some embodiments, X² and X⁶ each independently comprise a side chain comprising an acidic or a polar group. In some embodiments, X⁵ and X⁶ each independently comprise a side chain comprising an acidic or a polar group. In some embodiments, X² and X⁵ each independently comprise a side chain comprising an acidic group. In some embodiments, X² and X⁶ each independently comprise a side chain comprising an acidic group. In some embodiments, X⁵ and X⁶ each independently comprise a side chain comprising an acidic group. In some embodiments, X², X⁵ and X⁶ each independently comprise a side chain comprising an acidic or a polar group. In some embodiments, X², X⁵ and X⁶ each independently comprise a side chain comprising an acidic group. In some embodiments, each of X⁹ and X¹² independently comprises a side chain comprising an optionally substituted aromatic group. In some embodiments, each of X⁹ and X¹³ independently comprises a side chain comprising an optionally substituted aromatic group. In some embodiments, each of X⁹, X¹² and X¹³ independently comprises a side chain comprising an optionally substituted aromatic group. In some embodiments, each of X² and X⁵ independently comprises a side chain comprising an acidic group (e.g., —COOH), and each of X⁹, X¹² and X¹³ independently comprises a side chain comprising an optionally substituted aromatic group. In some embodiments, each of X², X⁵ and X⁶ independently comprises a side chain comprising an acidic group (e.g., —COOH), and each of X⁹, X¹² and X¹³independently comprises a side chain comprising an optionally substituted aromatic group.

[0309] As described herein, various types of amino acid residues (e.g., those of amino acids having the structure of formula A-I, A-II, A-III, A-IV, A-V, A-VI, etc. as described herein or in WO 2022/261257 and incorporated herein by reference) can be utilized in accordance with the present disclosure. Certain examples are described herein for X⁰, X¹, X², X³, X⁴, X⁵, X⁶, X⁷, X⁸, X⁹, X¹⁰, X¹¹, X¹², X¹³, X¹⁴, X¹⁵, X¹⁶, X¹⁷, etc.

[0310] Various embodiments are described for p0, X⁰, X¹, X², X³, X⁴, X⁵, X⁶, X⁷, X⁸, X⁹, X¹⁰, X¹¹, X¹², X¹³, X¹⁴, X¹⁵, X¹⁶, X¹⁷, etc. in WO 2022/261257 and are incorporated by reference.

[0311] For example, in some embodiments, X¹ is an amino acid reside suitable for stapling. In some embodiments, X¹ is stapled. In some embodiments, X¹ is PL3. In some embodiments, -Cy- is optionally substituted phenylene. PL3. In some embodiments, X² is a residue of amino acid (e.g., of formula A-I, A-II, A-III, A-IV, A-V, A-VI, etc. or a salt thereof) that comprises an acidic or polar group. In some embodiments, X² is a residue of amino acid whose side chain comprises an acidic group (in some embodiments, may be referred to as an “acidic amino acid residue”). In some embodiments, X² is Asp. In some embodiments, X² is Glu. In some embodiments, X³ is a hydrophobic amino acid residue. In some embodiments, X³ is a residue of an amino acid whose side chain is C₁₋₁₀ aliphatic optionally substituted with one or more non-polar and non-charged groups. In some embodiments, it is a residue of an amino acid whose side chain is C₁₋₁₀ aliphatic optionally substituted with one or more hydrophobic substituents. In some embodiments, it is a residue of an amino acid whose side chain is C₁₋₁₀ aliphatic. In some embodiments, it is a residue of an amino acid whose side chain is C₁₋₁₀ alkyl. In some embodiments, X³ is a residue of Ala, Val, Ile, Leu, Met, Phe, Tyr, Trp, Npg, Leu, Cha, Val, nLeu, Ile, CypA, CyLeu, Chg, DiethA, Ala, Aib, OctG, or Cba. In some embodiments, X³ is a residue of Npg, Leu, or Cha. In some embodiments, X³ is a residue of Npg. In some embodiments, X³ is a residue of Leu. In some embodiments, X³ is a residue of Cha. In some embodiments, X³ is a residue of Val. In some embodiments, X³ is a residue of nLeu. In some embodiments, X³ is a residue of Ile. In some embodiments, X³ is a residue of CypA. In some embodiments, X³ is a residue of CyLeu. In some embodiments, X³ is a residue of Chg. In some embodiments, X³ is a residue of DicthA. In some embodiments, X³ is a residue of Ala. In some embodiments, X³ is a residue of Aib. In some embodiments, X³ is a residue of OctG. In some embodiments, X³ is a residue of Cba. In some embodiments, X⁴ is residue of an amino acid suitable for stapling. In some embodiments, X⁴ is a residue of an amino acid which comprises two functional groups suitable for stapling. In some embodiments, X⁴ is a residue of an amino acid which comprises two olefins, e.g., two terminal olefins. In some embodiments, X⁴ is stapled. In some embodiments, X⁴ is stapled with X¹ and/or X¹¹. In some embodiments, X⁴ is B5. In some embodiments, X⁴ is R5. In some embodiments, X⁴ is R4. In some embodiments, X⁴ is R6. In some embodiments, X⁴ is S5. In some embodiments, X⁶ is a residue of amino acid that comprises an acidic or polar group. In some embodiments, X⁶ is a residue of amino acid whose side chain comprises an acidic group, e.g., a —COOH group or a salt form thereof. In some embodiments, X⁶ is a residue of 3COOHF, TfeGA, Asp, [CH2CMe2CO2H]TriAzDap, Glu, 2OH3COOHF, 4OH3COOHF, 4COOHF, 2COOHF, 5F3Me2COOHF, 4F3Me2COOHF, 5F3Me3COOHF, 4F3Me3COOHF, 3F2COOHF, or dGlu. In some embodiments, X⁶ is a residue of 3COOHF, TfeGA, Asp, or [CH₂CMe2CO₂H]TriAzDap. In some embodiments, X⁶ is a residue of 3COOHF. In some embodiments, X⁶ is a residue of TfeGA. In some embodiments, X⁶ is a residue of Asp. In some embodiments, X⁶ is a residue of Glu. In some embodiments, X⁷ is a hydrophobic amino acid residue, e.g., those described for X³. In some embodiments, X⁷ is a residue of an amino acid whose side chain is C₁₋₁₀ aliphatic optionally substituted with one or more non-polar and non-charged groups. In some embodiments, X⁷ is a residue of Ala. In some embodiments, X⁷ is a residue of Aib. In some embodiments, X⁷ is a residue of nLeu. In some embodiments, X⁷ is a residue of Cha. In some embodiments, X⁷ is a residue of Npg. In some embodiments, X⁷ is a residue of sAla. In some embodiments, X⁷ is a residue of Val. In some embodiments, X⁷ is a residue of CyLeu. In some embodiments, X⁷ is a residue of Leu. In some embodiments, X⁷ is a residue of Cpg. In some embodiments, X⁷ is a residue of Cbg. In some embodiments, X⁷ is a residue of aMeL. In some embodiments, X⁷ is a residue of DaMeL. In some embodiments, X⁷ is a residue of aMeV. In some embodiments, X⁸ is a hydrophobic amino acid residue, e.g., those described for X³. In some embodiments, X⁸ is a residue of Ala. In some embodiments, X⁸ is a residue of Aib. In some embodiments, X⁸ is a residue of Cpg. In some embodiments, X⁸ is a residue of Val. In some embodiments, X⁸ is a residue of Leu. In some embodiments, X⁸ is a residue of nLeu. In some embodiments, X⁸ is a residue of Cba. In some embodiments, X⁹ comprises a side chain comprising an optionally substituted aromatic group. In some embodiments, X⁹ is an aromatic amino acid residue as described herein. In some embodiments, X⁹ is Phe. In some embodiments, X⁹ is 3COOHF. In some embodiments, X⁹ is 2NapA. In some embodiments, X⁹ is Tyr. In some embodiments, X⁹ is 3Thi. In some embodiments, X⁹ is 4FF. In some embodiments, X⁹ is 4CIF. In some embodiments, X⁹ is 4BrF. In some embodiments, X⁹ is 3FF. In some embodiments, X⁹ is 3CIF. In some embodiments, X⁹ is 3BrF. In some embodiments, X⁹ is 2FF. In some embodiments, X⁹ is 30MeF. In some embodiments, X⁹ is 4CNF. In some embodiments, X⁹ is 3CNF. In some embodiments, X⁹ is 4MeF. In some embodiments, X⁹ is 3MeF. In some embodiments, X¹⁰ is a residue of an amino acid whose side chain comprises a polar group. In some embodiments, X¹⁰ is Asn, Gln, Lys, etc. In some embodiments, X¹⁰ is stapled. In some embodiments, X¹⁰ is not stapled. In some embodiments, X¹⁰ is stapled with X¹⁴. In some embodiments, a staple comprises —C(O)NH—. In some embodiments, X¹¹ is a residue of an amino acid suitable for stapling as described herein. In some embodiments, X¹¹ comprises —CH═CH₂. In some embodiments, X¹¹ is a residue of PyrS2. In some embodiments, X¹¹ is Az3. In some embodiments, X¹¹ is PyrS1. In some embodiments, X¹² comprises a side chain comprising an optionally substituted aromatic group. In some embodiments, X¹² is an aromatic amino acid residue as described herein. In some embodiments, X¹² is a residue of an amino acid selected from Phe, 1NapA, 2cmbF, 2F3MeF, 2CIF, 2FurA, 20MeF, 2MeF, 2BrF, 2CNF, 2NO₂F, 2PyrA, 2Thi, 3PyrA, 3Thi, or 4PyrA. In some embodiments, X¹² is a residue of Phe. In some embodiments, X¹² is a residue of 2F3MeF. In some embodiments, X¹² is a residue of 2CIF. In some embodiments, X¹² is a residue of 2FurA. In some embodiments, X¹² is a residue of 20MeF. In some embodiments, X¹² is a residue of 2MeF. In some embodiments, X¹² is a residue of 2BrF. In some embodiments, X¹² is a residue of 2CNF. In some embodiments, X¹² is a residue of 2NO₂F. In some embodiments, X¹² is a residue of 2PyraA. In some embodiments, X¹² is a residue of 3PyrA. In some embodiments, X¹² is a residue of 3Thi. In some embodiments, X¹² is a residue of 4PyrA. In some embodiments, X¹² is a residue of His. In some embodiments, X¹² is a residue of 1NapA. In some embodiments, X¹² is a residue of 2Thi. In some embodiments, X¹² is a residue of 2cmbF. In some embodiments, X¹³ comprises a side chain which is or comprises an optionally substituted aromatic group. In some embodiments, X¹³ is an aromatic amino acid residue as described herein. In some embodiments, X¹³ is a residue of BztA, 34CIF, 3Thi, Phe, 34MeF, 3BrF, 7FBztA, 2BrF, 3F3MeF, 4F3MeF, RbMe2NapA, RbMeBzta, SbMeBzta, 5IndA, 7CIBztA, 7MeBztA, 2CIF, 3CIF, 4BrF, 4CIF, or 3MeF. In some embodiments, X¹³ is BztA. In some embodiments, X¹³ is 34CIF. In some embodiments, X¹³ is 3Thi. In some embodiments, X¹³ is Phe. In some embodiments, X¹⁴ is an amino acid residue suitable for stapling. In some embodiments, X¹⁴ is stapled. In some embodiments, X¹⁴ is stapled with X¹⁰ as described herein. In some embodiments, X¹⁴ is stapled with X⁷ as described herein. In some embodiments, X¹⁴ is GlnR, Lys, sAla, Gln, Cys, TriAzLys, AsnR, hGlnR, 4PipA, sAbu, Orn, dGlnR, [4mampiperidine]GlnR, [39N2spiroundecane]GlnR, [29N2spiroundecane]GlnR, iPrLys, sCH2S, [diaminobutane]GlnR, or [4aminopiperidine]GlnR. In some embodiments, X¹⁴ is GlnR. In some embodiments, X¹⁴ is Lys. In some embodiments, X¹⁴ is sAla. In some embodiments, X¹⁴ is Gln. In some embodiments, X¹⁴ is Cys. In some embodiments, X¹⁴ is TriAzLys. In some embodiments, X¹⁴ is AsnR. In some embodiments, X¹⁴ is hGlnR. In some embodiments, X¹⁴ is 4PipA. In some embodiments, X¹⁴ is sAbu. In some embodiments, X¹⁴ is Orn. In some embodiments, X¹⁴ is dGlnR. In some embodiments, X¹⁴ is [4mampiperidine]GlnR. In some embodiments, X¹⁴ is [39N2spiroundecane]GlnR. In some embodiments, X¹⁴ is [29N2spiroundecane]GlnR. In some embodiments, X¹⁴ is iPrLys. In some embodiments, X¹⁴ is sCH2S. In some embodiments, X¹⁴ is [diaminobutane]GlnR. In some embodiments, X¹⁴ is [4aminopiperidine]GlnR. In some embodiments, X¹⁴ is a C-terminus amino acid residue. In some embodiments, p15 is 1. In some embodiments, p15 is 0. In some embodiments, X¹⁵ is a residue of Ala, Leu, Val, Aib, MorphNva, Thr, dAla, dLcu, [BiotinPEG8]Lys, Glu, or AzLys. In some embodiments, p16 is 1. In some embodiments, p16 is 0. In some embodiments, p17 is 1. In some embodiments, p17 is 0. In some embodiments, p18 is 1. In some embodiments, p18 is 0. In some embodiments, p19 is 1. In some embodiments, p19 is 0. In some embodiments, p20 is 1. In some embodiments, p20 is 0. In some embodiments, p21 is 1. In some embodiments, p21 is 0. In some embodiments, p22 is 1. In some embodiments, p22 is 0. In some embodiments, p23 is 1. In some embodiments, p23 is 0.

[0312] In some embodiments, an agent is or comprises a peptide having the structure of:

or a salt thereof, wherein:
[0313] each X is independently an amino acid residue;
[0314] each p and p′ is independently 0-10;
[0315] R^{N} is independently a peptide, an amino protecting group or R′-L^{RN}-;
[0316] R^{C} is independently a peptide, a carboxyl protecting group, -L^{RC}-R′, —O-L^{RC}-R′ or —N(R′)-L^{RC}-R′;
[0317] each of L^{RN} and L^{RC} is independently L;
[0318] each L is independently a covalent bond, or an optionally substituted, bivalent C₁-C₂₅ aliphatic or heteroaliphatic group having 1-10 heteroatoms, wherein one or more methylene units of the group are optionally and independently replaced with —C(R′)₂—, -Cy-, —O—, —S—, —S—S—, —N(R′)—, —C(O)—, —C(S)—, —C(NR′)—, —C(O)N(R′)—, —N(R′)C(O)N(R′)—, —N(R′)C(O)O—, —S(O)—, —S(O)₂—, —S(O)₂N(R′)—, —C(O)S—, or —C(O)O—;
[0319] each -Cy- is independently an optionally substituted bivalent, 3-30 membered, monocyclic, bicyclic or polycyclic ring having 0-10 heteroatoms;
[0320] each R′ is independently -R, —C(O)R, —CO₂R, or —SO₂R;
[0321] each R is independently —H, or an optionally substituted group selected from C₁₋₃₀ aliphatic, C₁₋₃₀ heteroaliphatic having 1-10 heteroatoms, C₆₋₃₀ aryl, C₆₋₃₀ arylaliphatic, C₆₋₃₀ arylheteroaliphatic having 1-10 heteroatoms, 5-30 membered heteroaryl having 1-10 heteroatoms, and 3-30 membered heterocyclyl having 1-10 heteroatoms, or
[0322] two R groups are optionally and independently taken together to form a covalent bond, or:
[0323] two or more R groups on the same atom are optionally and independently taken together with the atom to form an optionally substituted, 3-30 membered, monocyclic, bicyclic or polycyclic ring having, in addition to the atom, 0-10 heteroatoms; or two or more R groups on two or more atoms are optionally and independently taken together with their intervening atoms to form an optionally substituted, 3-30 membered, monocyclic, bicyclic or polycyclic ring having, in addition to the intervening atoms, 0-10 heteroatoms.

[0324] In some embodiments, p is 0. In some embodiments, p is 1, 2, 3, 4, 5, 6, 7, 8, 9, or 10. In some embodiments, p is 1. In some embodiments, p is 2. In some embodiments, p is 3. In some embodiments, p is 4. In some embodiments, p is 5. In some embodiments, p is 6. In some embodiments, p is 7. In some embodiments, p is 8. In some embodiments, p is 9. In some embodiments, p is 10.

[0325] In some embodiments, p′ is 0. In some embodiments, p′ is 1, 2, 3, 4, 5, 6, 7, 8, 9, or 10. In some embodiments, p′ is 1. In some embodiments, p′ is 2. In some embodiments, p′ is 3. In some embodiments, p′ is 4. In some embodiments, p′ is 5. In some embodiments, p′ is 6. In some embodiments, p′ is 7. In some embodiments, p′ is 8. In some embodiments, p′ is 9. In some embodiments, p′ is 10.

[0326] In some embodiments, R^{N} is an N-terminus capping group. In some embodiments, R^{N} is —C(O)R, wherein R is as described herein. In some embodiments, R is —H. In some embodiments, R is optionally substituted C₁₋₆ aliphatic. In some embodiments, R is optionally substituted C₁₋₆ alkyl. In some embodiments, R is methyl. In some embodiments, R^{N} is Ac. In some embodiments, R^{N} is a group suitable for stapling, or is stapled. In some embodiments, R^{N} is 4pentenyl. In some embodiments, R^{N} is 5hexenyl. In some embodiments, R^{N} is BzAm20Allyl. In some embodiments, R^{N} is Ac, NPyroR3, 5hexenyl, 4pentenyl, Bua, C3a, Cpc, Cbc, CypCO, Bnc, CF3CO, 2PyCypCO, 4THPCO, Isobutyryl, Ts, 15PyraPy, 2PyBu, 4PymCO, 4PyPrpc, 3IAPAc, 4MePipzPrpC, MePipAc, Melmid4SO2, BzAm20Allyl, Hex, 2PyzCO, 3Phc3, MeOPr, lithocholate, 2FPhc, PhC, MeSO2, Isovaleryl, EtHNCO, TzPyr, 8IAP, 3PydCO, 2PymCO, 5PymCO, 1Imidac, 2F2PyAc, 2IAPAc, 124TriPr, 6QuiAc, 3PyAc, 123TriAc, 1PyrazoleAc, 3PyPrpc, 5PymAc, 1PydoneAc, 124TriAc, Me2NAc, 8QuiSO2, MPEG4, mPEG8, mPEG16 or mPEG24.

[0327] In some embodiments, R^{C} is a C-terminus capping group. In some embodiments, R^{C} comprises a PEG moiety. In some embodiments, R^{C} is —O-L^{RC}-R′ wherein each of L^{RC} and R′ is independently as described herein. In some embodiments, R^{C} is —OR′, wherein R′ is optionally substituted C₁-C₁₀ aliphatic. In some embodiments, R^{C} is —OR′, wherein R′ is optionally substituted C₁-C₁₀ alkyl. In some embodiments, R^{C} is —OR′, wherein R′ is optionally substituted C₁₋₃₀ heteroaliphatic having 1-10 heteroatoms. In some embodiments, R^{C} is -L^{RC}-R′, wherein one or more methylene unit of L^{RC} are replaced with —O— and R′ is as described herein. In some embodiments, R^{C} is —O-L^{RC}-R′, wherein L^{RC} is optionally substituted C₁₋₆ alkylene and R′ is as described herein. In some embodiments, R^{C} is —O-L^{RC}-R′, wherein L^{RC} is optionally substituted C₁₋₆ alkylene and R′ is an optionally substituted group selected from C₆₋₃₀ aryl and 5-30 membered heteroaryl having 1-10 heteroatoms. In some embodiments, R^{C} is —OR′ wherein R′ is optionally substituted C₆₋₃₀ arylaliphatic. In some embodiments, R^{C} is —N(R′)₂ wherein each R′ is independently as described herein. In some embodiments, R^{C} is —NHR′ wherein R′ is as described herein. In some embodiments, R^{C} is —N(R)₂ wherein each R is independently as described herein. In some embodiments, R^{C} is —NHR wherein R is as described herein. In some embodiments, R is —H. In some embodiments, R is optionally substituted C₁₋₆ aliphatic. In some embodiments, R is optionally substituted C₁₋₆ alkyl. In some embodiments, R is methyl. In some embodiments, R is ethyl. In some embodiments, R^{C} is —NH₂. In some embodiments, R^{C} is —NHEt.

[0328] In some embodiments, R^{C} is —NHC (CH₃)CH₂OH. In some embodiments, R^{C} is —(S)—NHC (CH₃)CH₂OH. In some embodiments, R^{C} is —(R)—NHC (CH₃)CH₂OH. In some embodiments, R^{C} is

In some embodiments, R^{C} is

In some embodiments, R^{C} is

In some embodiments, R^{C} is

In some embodiments, R^{C} is

[0329] In some embodiments, R^{C} is -Alaol, wherein the amino group of -Alaol is bonded to the last —C(O)— of the peptide backbone (R^{C} is

In some embodiments, R^{C} is -dAlaol, wherein the amino group of -dAlaol is bonded to the last —C(O)— of the peptide backbone (R^{C} is

In some embodiments, R^{C} is -Prool, wherein the amino group of -Prool is bonded to the last —C(O)— of the peptide backbone (R^{C} is

In some embodiments, R^{C} is -Throl, wherein the amino group of -Throl is bonded to the last —C(O)— of the peptide backbone (R^{C} is

In some embodiments, R^{C} is -Serol, wherein the amino group of -Serol is bonded to the last —C(O)— of the peptide backbone (R^{C} is

[0330] In some embodiments, R^{C} is —OH.

[0331] In some embodiments, an agent is or comprises a peptide analog. In some embodiments, an agent is or comprises an analog of a peptide described herein or a portion thereof. In some embodiments, an agent is or comprises an analog of a peptide described herein. In some embodiments, in a peptide analog, one or more of amino (e.g., —NH—), carbonyl or amide group (e.g., —C(O)NH—) are independently replaced with LR each of which is independently L as described herein. In some embodiments, in an analog of a peptide, one or more of backbone amino, carbonyl or amide group are independently replaced with LR as described herein. In some embodiments, LR is a bivalent moiety with a length of 0, 1, 2, 3, 4, or 5 atoms between its two covalent bonds (e.g., for —CH₂—, one atom (one carbon atom between the two covalent bonds); for —CH₂CH₂—, two atoms (two carbon atoms between the two covalent bonds), etc.). In some embodiments, a length is 1 atom. In some embodiments, a length is 2 atoms. In some embodiments, a length is 3 atoms. In some embodiments, a length is 4 atoms. In some embodiments, a length is 5 atoms. In some embodiments, the length of L^{R} (or L, or any moiety that can be L), measured by the number of atoms between its two covalent bonds, are the same as, or no more than about 1 or 2 atoms longer or shorter than, a group it replaces. In some embodiments, the length of L^{R} (or L, or any moiety that can be L), measured by the number of atoms between its two covalent bonds, are the same as a group it replaces. In some embodiments, L^{R} is a covalent bond. In some embodiments, L^{R} is optionally substituted —CH₂—. In some embodiments, L^{R} is optionally substituted —CH₂—CH₂—. In some embodiments, L^{R} is optionally substituted —CHR′—CHR′—. In some embodiments, L^{R} is optionally substituted —C(R′)₂—C(R′)₂—. In some embodiments, L^{R} is optionally substituted —CH═CH—. In some embodiments, L^{R} is —C(R′)═C(R′)—. In some embodiments, L is L^{R} as described herein. In some embodiments, an amino group is replaced with a covalent bond. In some embodiments, an amino group is replaced with optionally substituted —CH₂—. In some embodiments, a carbonyl group is replaced with a covalent bond. In some embodiments, a carbonyl group is replaced with optionally substituted —CH₂—. In some embodiments, an amide group is replaced with a covalent bond. In some embodiments, an amide group is replaced with optionally substituted —CH₂—. In some embodiments, an amide group is replaced with optionally substituted —CH₂—CH₂—. In some embodiments, an amide group is replaced with —C(R′)₂—C(R′)₂—. In some embodiments, an amide group is replaced with optionally substituted —CHR′—CHR′—. In some embodiments, an amide group is replaced with optionally substituted —CH═CH—. In some embodiments, an amide group is replaced with —C(R′)═C(R′)—.

### Amino Acids

[0332] As appreciated by those skilled in the art, various amino acids may be utilized in accordance with the present disclosure. For example, both naturally occurring and non-naturally occurring amino acids can be utilized in accordance with the present disclosure. In some embodiments, an amino acid is a compound comprising an amino group that can form an amide group with a carboxyl group and a carboxyl group. In some embodiments, an amino acid is an alpha amino acid. In some embodiments, an amino acid is a beta-amino acid. In some embodiments, an amino acid is a D-amino acid. In some embodiments, an amino acid is a L-amino acid. In some embodiments, an amino acid is an naturally encoded amino acid, e.g., in mammalian cells.

[0333] In some embodiments, an amino acid is a compound having the structure of formula A-I: or a salt thereof, wherein:

[0334] each of R^{a1}, R^{a2}, R^{a3} is independently -L^{a}-R′;
[0335] each of L^{a}, L^{a1} and L^{a2} is independently L;
[0336] each L is independently a covalent bond, or an optionally substituted, bivalent C₁-C₂₅ aliphatic or heteroaliphatic group having 1-10 heteroatoms, wherein one or more methylene units of the group are optionally and independently replaced with —C(R′)₂—, -Cy-, —O—, —S—, —S—S—, —N(R′)—, —C(O)—, —C(S)—, —C(NR′)—, —C(O)N(R′)—, —N(R′)C(O)N(R′)—, —N(R′)C(O)O—, —S(O)—, —S(O)₂—, —S(O)₂N(R′)—, —C(O)S—, or —C(O)O—;
[0337] each -Cy- is independently an optionally substituted bivalent, 3-30 membered, monocyclic, bicyclic or polycyclic ring having 0-10 heteroatoms;
[0338] each R′ is independently —R, —C(O)R, —CO₂R, or —SO₂R;
[0339] each R is independently —H, or an optionally substituted group selected from C₁₋₃₀ aliphatic, C₁₋₃₀ heteroaliphatic having 1-10 heteroatoms, C₆₋₃₀ aryl, C₆₋₃₀ arylaliphatic, C₆₋₃₀ arylheteroaliphatic having 1-10 heteroatoms, 5-30 membered heteroaryl having 1-10 heteroatoms, and 3-30 membered heterocyclyl having 1-10 heteroatoms, or
[0340] two R groups are optionally and independently taken together to form a covalent bond, or:
[0341] two or more R groups on the same atom are optionally and independently taken together with the atom to form an optionally substituted, 3-30 membered, monocyclic, bicyclic or polycyclic ring having, in addition to the atom, 0-10 heteroatoms; or
[0342] two or more R groups on two or more atoms are optionally and independently taken together with their intervening atoms to form an optionally substituted, 3-30 membered, monocyclic, bicyclic or polycyclic ring having, in addition to the intervening atoms, 0-10 heteroatoms.

[0343] In some embodiments, a compound having the structure of formula A-I or a salt thereof has the structure of NH(R^{a1})-L^{a1}-C(R^{a2})(R^{a3})-L^{a2}—COOH or a salt thereof.

[0344] In some embodiments, a ring moiety of, e.g., -Cy-, R (including those formed by R groups taken together), etc. is monocyclic. In some embodiments, a ring moiety is bicyclic or polycyclic. In some embodiments, a monocyclic ring is an optionally substituted 3-10 (3, 4, 5, 6, 7, 8, 9, or 10, 3-8, 3-7, 4-7, 4-6, 5-6, etc.) membered, saturated, partially unsaturated or aromatic ring having 0-5 heteroatoms. In some embodiments, each monocyclic ring unit of a bicyclic or polycyclic ring moiety is independently an optionally substituted 3-10 (3, 4, 5, 6, 7, 8, 9, or 10, 3-8, 3-7, 4-7, 4-6, 5-6, etc.) membered, saturated, partially unsaturated or aromatic ring having 0-5 heteroatoms.

[0345] In some embodiments, each heteroatom is independently selected from oxygen, nitrogen, sulfur, phosphorus and silicon. In some embodiments, each heteroatom is independently selected from oxygen, nitrogen, and sulfur.

[0346] In some embodiments, L^{a1} is a covalent bond. In some embodiments, a compound of formula A-1 is of the structure NH(R^{a1})—C(R^{a2})(R^{a3})-L^{a2}—COOH.

[0347] In some embodiments, L^{a2} is a covalent bond. In some embodiments, a compound of formula A-1 is of the structure NH(R^{a1})—C(R^{a2})(R^{a3})-L^{a2}—COOH).

[0348] In some embodiments, L^{a1} is a covalent bond and L^{a2} is a covalent bond. In some embodiments, a compound of formula A-1 is of the structure NH(R^{a1})—C(R^{a2})(R^{a3})—COOH.

[0349] In some embodiments, an amino acid is suitable for stapling. In some embodiments, an amino acid comprises a terminal olefin. Certain such amino acids are exemplified herein (e.g., those described in or utilized in peptides of various Tables).

[0350] In some embodiments, an agent comprises a detectable moiety, which can either be detected directly or indirectly. For example, in some embodiments, a detectable moiety is or comprises a fluorescent group. In some embodiments, a detectable moiety is or comprises a biotin moiety. In some embodiments, a detectable moiety is connected to the rest of an agent at an amino acid residue, e.g., through a side chain, optionally through a linker (e.g., L as described herein). In some embodiments, a detectable moiety is —N3, which may be detected after a click chemistry reaction with a labeled agent comprising an alkyne.

[0351] In some embodiments, the present disclosure provides various compounds, which among other things may be utilized as amino acids for a number of applications, e.g., for preparation of peptides or other useful compounds.

[0352] In some embodiments, a compound (e.g., an amino acid or a protected and/or activated form thereof) or a salt thereof comprises 1) a first group which is an optionally protected amino group, 2) a second group which is an optionally protected and/or activated carboxyl group, and 3) a side chain (typically bonded to an atom between the first and second groups (“a side chain attachment atom”)) which comprises an optionally protected and/or activated carboxyl group and a) an optionally substituted ring (which ring is typically between the optionally protected and/or activated carboxyl group of the side chain and a side chain attachment atom) or b) an amino group (which amino group is typically between the optionally protected and/or activated carboxyl group of the side chain and a side chain attachment atom). In some embodiments, a provided compound is an optionally protected and/or activated amino acid or a salt thereof, wherein the side chain of the amino acid comprises an optionally protected and/or activated carboxyl group, and an optionally substituted ring or an amino group, wherein the optionally substituted ring or an amino group is between the optionally protected and/or activated carboxyl group and a backbone atom to which a side chain is attached (e.g., an atom between an amino and carboxyl group, both of which can be optionally and independently protected and/or activated (e.g., an alpha carbon atom in an amino acid)).

[0353] In some embodiments, the present disclosure provides compounds having the structure of formula PA:

or a salt thereof, wherein:
[0354] R^{PA} is —H or an amino protecting group;
[0355] each of R^{a1} and R^{a3} is independently -L^{a}-R′;
[0356] R^{a2} is -L^{aa}-C(O)R^{PS};
[0357] each of L^{a}, L^{a1} and L^{a2} is independently L;
[0358] —C(O)R^{PS} is optionally protected or activated —COOH;
[0359] —C(O)R^{PC} is optionally protected or activated —COOH;
[0360] each L is independently a covalent bond, or an optionally substituted, bivalent C₁-C₂₅ aliphatic or heteroaliphatic group having 1-10 heteroatoms wherein one or more methylene units of the group are optionally and independently replaced with —C(R′)₂—, -Cy-, —O—, —S—, —S—S—, —N(R′)—, —C(O)—, —C(S)—, —C(NR′)—, —C(O)N(R′)—, —N(R′)C(O)N(R′)—, —N(R′)C(O)O—, —S(O)—, —S(O)₂—, —S(O)₂N(R′)—, —C(O)S—, or —C(O)O—;
[0361] each -Cy- is independently an optionally substituted bivalent, 3-30 membered, monocyclic, bicyclic or polycyclic ring having 0-10 heteroatoms;
[0362] each R′ is independently -R, —C(O)R, —CO₂R, or —SO₂R; and
[0363] each R is independently —H, or an optionally substituted group selected from C₁₋₃₀ aliphatic, C₁₋₃₀ heteroaliphatic having 1-10 heteroatoms, C_{6 30} aryl, C_{6 30} arylaliphatic, C_{6 30} arylheteroaliphatic having 1-10 heteroatoms, 5-30 membered heteroaryl having 1-10 heteroatoms, and 3-30 membered heterocyclyl having 1-10 heteroatoms, or
[0364] two R groups are optionally and independently taken together to form a covalent bond, or:
[0365] two or more R groups on the same atom are optionally and independently taken together with the atom to form an optionally substituted, 3-30 membered, monocyclic, bicyclic or polycyclic ring having, in addition to the atom, 0-10 heteroatoms; or
[0366] two or more R groups on two or more atoms are optionally and independently taken together with their intervening atoms to form an optionally substituted, 3-30 membered, monocyclic, bicyclic or polycyclic ring having, in addition to the intervening atoms, 0-10 heteroatoms.

[0367] In some embodiments, an amino acid is described in WO 2022/261257, the amino acids of which are incorporated herein by reference.

[0368] As described above, each L is independently a covalent bond, or an optionally substituted, bivalent C₁-C₂₅ aliphatic or heteroaliphatic group having 1-10 heteroatoms wherein one or more methylene units of the group are optionally and independently replaced with —C(R′)₂—, -Cy-, —O—, —S—, —S—S—, —N(R′)—, —C(O)—, —C(S)—, —C(NR′)—, —C(O)N(R′)—, —N(R′)C(O)N(R′)—, —N(R′)C(O)O—, —S(O)—, —S(O)₂—, —S(O)₂N(R′)—, —C(O)S—, or —C(O)O—.

[0369] In some embodiments, L is a covalent bond.

[0370] In some embodiments, L (or L^{a}, L^{aa}, L^{a1}, L^{a2}, L^{s1}, L^{s2}, L^{s3}, or another variable or moiety that can be L, or a linker moiety) is an optionally substituted, bivalent C₁-C₂₅, C₁-C₂₀, C₁-C₁₅, C₁-C₁₀, C₁-C₉, C₁-C₈, C₁-C₇, C₁-C₆, C₁-C₅, C₁-C₄, C₁-C₃, C₁-C₂, or C₁, C₂, C₃, C₄, C₅, C₆, C₇, C₈, C₉, C₁₀, C₁, C₁₂, C₁₃, C₁₄, C₁₅, C₁₆, C₁₇, C₁₈, C₁₉, or C₂₀, aliphatic wherein one or more methylene units of the group are optionally and independently replaced with —C(R′)₂—, -Cy-, —O—, —S—, —S—S—, —N(R′)—, —C(O)—, —C(S)—, —C(NR′)—, —C(O)N(R′)—, —N(R′)C(O)N(R′)—, —N(R′)C(O)O—, —S(O)—, —S(O)₂—, —S(O)₂N(R′)—, —C(O)S—, or —C(O)O—.

[0371] In some embodiments, L, L^{a}, L^{aa}, L^{a1}, L^{a2}, L^{s1}, L^{s2}, L^{s3}, L″, or another variable or moiety that can be L, or a linker moiety, is an optionally substituted, bivalent C₁-C₂₅, C₁-C₂₀, C₁-C₁₅, C₁-C₁₀, C₁-C₉, C₁-C₈, C₁-C₇, C₁-C₆, C₁-C₅, C₁-C₄, C₁-C₃, C₁-C₂, or C₁, C₂, C₃, C₄, C₅, C₆, C₇, C₈, C₉, C₁₀, C₁, C₁₂, C₁₃, C₁₄, C₁₅, C₁₆, C₁₇, C₁₈, C₁₉, or C₂₀, aliphatic wherein one or more methylene units of the group are optionally and independently replaced with —C(R′)₂—, -Cy-, —O—, —S—, —S—S—, —N(R′)—, —C(O)—, —C(S)—, —C(NR′)—, —C(O)N(R′)—, —N(R′)C(O)N(R′)—, —N(R′)C(O)O—, —S(O)—, —S(O)₂—, —S(O)₂N(R′)—, —C(O)S—, or —C(O)O—. In some embodiments, it is an optionally substituted, bivalent C₁-C₁₀, C₁-C₉, C₁-C₈, C₁-C₇, C₁-C₆, C₁-C₅, C₁-C₄, C₁-C₃, C₁-C₂, or C₁, C₂, C₃, C₄, C₅, C₆, C₇, C₈, C₉, or C₁₀, aliphatic wherein one or more methylene units of the group are optionally and independently replaced with —C(R′)₂—, -Cy-, —O—, —S—, —S—S—, —N(R′)—, —C(O)—, —C(S)—, —C(NR′)—, —C(O)N(R′)—, —N(R′)C(O)N(R′)—, —N(R′)C(O)O—, —S(O)—, —S(O)₂—, —S(O)₂N(R′)—, —C(O)S—, or —C(O)O—. In some embodiments, it is an optionally substituted, bivalent C₂ aliphatic wherein one or more methylene units of the group are optionally and independently replaced with —C(R′)₂—, -Cy-, —O—, —S—, —S—S—, —N(R′)—, —C(O)—, —C(S)—, —C(NR′)—, —C(O)N(R′)—, —N(R′)C(O)N(R′)—, —N(R′)C(O)O—, —S(O)—, —S(O)₂—, —S(O)₂N(R′)—, —C(O)S—, or —C(O)O—. In some embodiments, it is an optionally substituted, bivalent C₃ aliphatic wherein one or more methylene units of the group are optionally and independently replaced with —C(R′)₂—, -Cy-, —O—, —S—, —S—S—, —N(R′)—, —C(O)—, —C(S)—, —C(NR′)—, —C(O)N(R′)—, —N(R′)C(O)N(R′)—, —N(R′)C(O)O—, —S(O)—, —S(O)₂—, —S(O)₂N(R′)—, —C(O)S—, or —C(O)O—. In some embodiments, it is an optionally substituted, bivalent C₄ aliphatic wherein one or more methylene units of the group are optionally and independently replaced with —C(R′)₂—, -Cy-, —O—, —S—, —S—S—, —N(R′)—, —C(O)—, —C(S)—, —C(NR′)—, —C(O)N(R′)—, —N(R′)C(O)N(R′)—, —N(R′)C(O)O—, —S(O)—, —S(O)₂—, —S(O)₂N(R′)—, —C(O)S—, or —C(O)O—. In some embodiments, it is an optionally substituted, bivalent C₅ aliphatic wherein one or more methylene units of the group are optionally and independently replaced with —C(R′)₂—, -Cy-, —O—, —S—, —S—S—, —N(R′)—, —C(O)—, —C(S)—, —C(NR′)—, —C(O)N(R′)—, —N(R′)C(O)N(R′)—, —N(R′)C(O)O—, —S(O)—, —S(O)₂—, —S(O)₂N(R′)—, —C(O)S—, or —C(O)O—. In some embodiments, it is an optionally substituted, bivalent C₆ aliphatic wherein one or more methylene units of the group are optionally and independently replaced with —C(R′)₂—, -Cy-, —O—, —S—, —S—S—, —N(R′)—, —C(O)—, —C(S)—, —C(NR′)—, —C(O)N(R′)—, —N(R′)C(O)N(R′)—, —N(R′)C(O)O—, —S(O)—, —S(O)₂—, —S(O)₂N(R′)—, —C(O)S—, or —C(O)O—. In some embodiments, the bivalent aliphatic is saturated. In some embodiments, the bivalent aliphatic is linear. In some embodiments, the bivalent aliphatic is branched. In some embodiments, it is an optionally substituted, bivalent linear saturated C₆ aliphatic wherein one or more methylene units of the group are optionally and independently replaced with —C(R′)₂—, -Cy-, —O—, —S—, —S—S—, —N(R′)—, —C(O)—, —C(S)—, —C(NR′)—, —C(O)N(R′)—, —N(R′)C(O)N(R′)—, —N(R′)C(O)O—, —S(O)—, —S(O)₂—, —S(O)₂N(R′)—, —C(O)S—, or —C(O)O—. In some embodiments, each replacement if any is independently with -Cy-, —O—, —S—, —S—S—, —N(R′)—, —C(O)—, —C(S)—, —C(NR′)—, —C(O)N(R′)—, —N(R′)C(O)N(R′)—, —N(R′)C(O)O—, —S(O)—, —S(O)₂—, —S(O)₂N(R′)—, —C(O)S—, or —C(O)O—. In some embodiments, each replacement if any is independently with -Cy-, —O—, —S—, —N(R′)—, —C(O)—, —C(S)—, —C(NR′)—, —C(O)N(R′)—, —N(R′)C(O)N(R′)—, —N(R′)C(O)O—, —S(O)—, —S(O)₂—, —S(O)₂N(R′)—, —C(O)S—, or —C(O)O—. In some embodiments, each replacement if any is independently with —O—, —S—, —N(R′)—, —C(O)—, —S(O)—, —S(O)₂—, —S(O)₂N(R′)—, —C(O)S—, or —C(O)O—. In some embodiments, each replacement if any is independently with —O—, —S—, —N(R′)—, or —C(O)—. In some embodiments, L, L^{a}, L^{aa}, L^{a1}, L^{a2}, L^{s1}, L^{s2}, L^{s3}, L″, or another variable or moiety that can be L, or a linker moiety, is an optionally substituted, bivalent C₁-C₆ linear saturated aliphatic wherein one or more methylene units is optionally and independently replaced with —O—, —S—, —N(R′)—, or —C(O)—. In some embodiments, it is an optionally substituted, bivalent C₁-C₅ linear saturated aliphatic wherein one or more methylene units is optionally and independently replaced with —O—, —S—, —N(R′)—, or —C(O)—. In some embodiments, it is an optionally substituted, bivalent C₁-C₄ linear saturated aliphatic wherein one or more methylene units is optionally and independently replaced with —O—, —S—, —N(R′)—, or —C(O)—. In some embodiments, it is an optionally substituted, bivalent C₁-C₃ linear saturated aliphatic wherein one or more methylene units is optionally and independently replaced with —O—, —S—, —N(R′)—, or —C(O)—. In some embodiments, it is an optionally substituted, bivalent C₁-C₂ linear saturated aliphatic wherein one or more methylene units is optionally and independently replaced with —O—, —S—, —N(R′)—, or —C(O)—. In some embodiments, it is a bivalent C₁-C₆ linear saturated aliphatic wherein one or more methylene units is optionally and independently replaced with —O—, —S—, —N(R′)—, or —C(O)—. In some embodiments, it is a bivalent C₁-C₅ linear saturated aliphatic wherein one or more methylene units is optionally and independently replaced with —O—, —S—, —N(R′)—, or —C(O)—. In some embodiments, it is a bivalent C₁-C₄ linear saturated aliphatic wherein one or more methylene units is optionally and independently replaced with —O—, —S—, —N(R′)—, or —C(O)—. In some embodiments, it is a bivalent C₁-C₃ linear saturated aliphatic wherein one or more methylene units is optionally and independently replaced with —O—, —S—, —N(R′)—, or —C(O)—. In some embodiments, it is a bivalent C₁-C₂ linear saturated aliphatic wherein one or more methylene units is optionally and independently replaced with —O—, —S—, —N(R′)—, or —C(O)—. In some embodiments, there is no replacement of methylene unit. In some embodiments, there is one replacement. In some embodiments, there is two replacement. In some embodiments, there is three replacement. In some embodiments, there is four or more replacement. In some embodiments, R′ in each moiety that is utilized to replace a methylene unit (e.g., —N(R′)—) as described herein is hydrogen or optionally substituted C₁₋₆ aliphatic or phenyl. In some embodiments, R′ is each such moiety is hydrogen or optionally substituted C₁₋₆ alkyl. In some embodiments, R′ is each such moiety is hydrogen or C₁₋₆ alkyl. In some embodiments, each -Cy- is optionally substituted bivalent ring selected from 3-10, 3-9, 3-8, 3-7, 5-10, 5-9, 5-8, 5-7, 5-6, or 3, 4, 5, 6, 7, 8, 9, or 10 membered cycloaliphatic and heterocyclylene having 1-3 heteroatoms, phenylene, and 5-6 membered heteroarylene having 1-3 heteroatoms. In some embodiments, -Cy- is optionally substituted bivalent 3-10, 3-9, 3-8, 3-7, 5-10, 5-9, 5-8, 5-7, 5-6, or 3, 4, 5, 6, 7, 8, 9, or 10 membered cycloaliphatic. In some embodiments, -Cy- is optionally substituted 3-10, 3-9, 3-8, 3-7, 5-10, 5-9, 5-8, 5-7, 5-6, or 3, 4, 5, 6, 7, 8, 9, or 10 membered heterocyclylene having 1-3 heteroatoms. In some embodiments, -Cy- is optionally substituted 3-10, 3-9, 3-8, 3-7, 5-10, 5-9, 5-8, 5-7, 5-6, or 3, 4, 5, 6, 7, 8, 9, or 10 membered heterocyclylene having 1 heteroatom. In some embodiments, -Cy- is optionally substituted phenylene. In some embodiments, -Cy- is phenylene. In some embodiments, -Cy- is optionally substituted 5-6 membered heteroarylene having 1-3 heteroatoms. In some embodiments, -Cy- is optionally substituted 5-6 membered heteroarylene having 1 heteroatom. In some embodiments, a heteroatom is nitrogen. In some embodiments, a heteroatom is oxygen. In some embodiments, a heteroatom is sulfur. In some embodiments, L, L^{a}, L^{aa}, L^{a1}, L^{a2}, L^{s1}, L^{s2}, L^{s3}, L″, or another variable or moiety that can be L, or a linker moiety, is optionally substituted —(CH₂)n-. In some embodiments, it is —(CH₂)n-. In some embodiments, n is 1. In some embodiments, n is 2. In some embodiments, n is 3. In some embodiments, n is 4. In some embodiments, n is 5. In some embodiments, n is 6. In some embodiments, n is 7. In some embodiments, n is 8. In some embodiments, n is 9. In some embodiments, n is 10.

[0372] In some embodiments, L, L^{a}, L^{aa}, L^{a1}, L^{a2}, L^{s1}, L^{s2}, L^{s3}, L″, or another variable or moiety that can be L, or a linker moiety, is an optionally substituted, bivalent heteroaliphatic group having 1-10 heteroatoms wherein one or more methylene units of the group are optionally and independently replaced with —C(R′)₂—, -Cy-, —O—, —S—, —S—S—, —N(R′)—, —C(O)—, —C(S)—, —C(NR′)—, —C(O)N(R′)—, —N(R′)C(O)N(R′)—, —N(R′)C(O)O—, —S(O)—, —S(O)₂—, —S(O)₂N(R′)—, —C(O)S—, or —C(O)O—.

[0373] Those skilled in the art appreciate that embodiments described for one linker moiety that can be L or L″ (e.g., L^{aa}, L^{s1}, L^{s2}, L^{s3}, L^{s}, L^{a}, L^{a1}, L^{a2}, L^{RN}, etc.) may also be utilized for another group that can be L or L″ to the extent that such embodiments fall within the definition of L or L″.

[0374] As described above, each R′ is independently -R, —C(O)R, —CO₂R, or —SO₂R. In some embodiments, R′ is -L^{a}-R. In some embodiments, R′ is R. In some embodiments, R′ is —C(O)R. In some embodiments, R′ is —CO₂R. In some embodiments, R′ is —SO₂R. In some embodiments, R′ is —H.

[0375] As described above, each R is independently —H, or an optionally substituted group selected from C₁₋₃₀ aliphatic, C₁₋₃₀ heteroaliphatic having 1-10 heteroatoms, C₆₋₃₀ aryl, C₆₋₃₀ arylaliphatic, C₆₋₃₀ arylheteroaliphatic having 1-10 heteroatoms, 5-30 membered heteroaryl having 1-10 heteroatoms, and 3-30 membered heterocyclyl having 1-10 heteroatoms, or
[0376] two R groups are optionally and independently taken together to form a covalent bond, or
[0377] two or more R groups on the same atom are optionally and independently taken together with the atom to form an optionally substituted, 3-30 membered, monocyclic, bicyclic or polycyclic ring having, in addition to the atom, 0-10 heteroatoms; or
[0378] two or more R groups on two or more atoms are optionally and independently taken together with their intervening atoms to form an optionally substituted, 3-30 membered, monocyclic, bicyclic or polycyclic ring having, in addition to the intervening atoms, 0-10 heteroatoms.

[0379] As described herein, in some embodiments, R is —H. In some embodiments, R is not-H. In some embodiments, R is optionally substituted C₁₋₁₀ aliphatic. In some embodiments, R is optionally substituted C₁₋₁₀ alkyl. In some embodiments, R is methyl. In some embodiments, R is ethyl. In some embodiments, R is isopropyl. In some embodiments, R is —CF3. In some embodiments, R is —CH₂CF3. In some embodiments, R is butyl. In some embodiments, R is t-butyl. In some embodiments, R is optionally substituted C₃₋₁₀ cycloaliphatic. In some embodiments, R is optionally substituted C₃₋₁₀ cycloalkyl. In some embodiments, R is optionally substituted cyclopropyl. In some embodiments, R is optionally substituted cyclobutyl. In some embodiments, R is optionally substituted cyclopentyl. In some embodiments, R is optionally substituted cyclohexyl. In some embodiments, R is optionally substituted phenyl. In some embodiments, R is phenyl. In some embodiments, R is optionally substituted 5-membered heteroaryl having 1-3 heteroatoms. In some embodiments, R is optionally substituted 5-membered heteroaryl having 1 heteroatom. In some embodiments, R is optionally substituted 6-membered heteroaryl having 1-3 heteroatoms. In some embodiments, R is optionally substituted 6-membered heteroaryl having 1 heteroatom. In some embodiments, R is optionally substituted bicyclic 8-10 membered aromatic ring having 0-5 heteroatoms. In some embodiments, R is optionally substituted bicyclic 9-membered aromatic ring having 1-5 heteroatoms. In some embodiments, R is optionally substituted bicyclic 10-membered aromatic ring having 1-5 heteroatoms. In some embodiments, R is optionally substituted bicyclic 9-membered aromatic ring having 1 heteroatom. In some embodiments, R is optionally substituted bicyclic 10-membered aromatic ring having 1 heteroatom. In some embodiments, R is optionally substituted bicyclic 10-membered aromatic ring having no heteroatom. In some embodiments, R is optionally substituted 3-10 membered heterocyclyl having 1-5 heteroatoms. In some embodiments, R is optionally substituted 5-14 membered bicyclic heterocyclyl having 1-5 heteroatoms.

[0380] In some embodiments, two R groups (or two groups that can be R, e.g., two groups each independently selected from R′, R^{a1}, R^{a2}, R^{a3}, R^{a5}, R^{RN}, etc.) are taken together with their intervening atom(s) to form an optionally substituted 3-30 membered, monocyclic, bicyclic or polycyclic ring having, in addition to the atom, 0-10 heteroatoms. In some embodiments, a formed ring is substituted. In some embodiments, a formed ring is unsubstituted. In some embodiments, a formed ring is 3-30, 3-20, 3-15, 3-10, 3-9, 3-8, 3-7, 3-6, 4-10, 4-9, 4-8, 4-7, 4-6, 5-10, 5-9, 5-8, 5-7, 5-6, or 1, 2, 3, 4, 5, 6, 7, 8, 9, 10, 11, 12, 13, 14, 15, 16, 17, 18, 19, 20, 21, 22, 23, 24, 25, 26, 27, 28, 29 or 30 membered. In some embodiments, a formed ring is 3-10 membered. In some embodiments, a formed ring is 3-7 membered. In some embodiments, a formed ring is 4-10 membered. In some embodiments, a formed ring is 4-7 membered. In some embodiments, a formed ring is 5-10 membered. In some embodiments, a formed ring is 5-7 membered. In some embodiments, a formed ring is 3-membered. In some embodiments, a formed ring is 4-membered. In some embodiments, a formed ring is 5-membered. In some embodiments, a formed ring is 6-membered. In some embodiments, a formed ring is 7-membered. In some embodiments, a formed ring is 8-membered. In some embodiments, a formed ring is 9-membered. In some embodiments, a formed ring is 10-membered. In some embodiments, a formed ring is monocyclic. In some embodiments, a formed ring is bicyclic. In some embodiments, a formed ring is polycyclic. In some embodiments, a formed ring has no heteroatoms in addition to the intervening atom(s). In some embodiments, a formed ring has 1-10, e.g., 1-5, 1-3, or 1, 2, 3, 4, 5, 6, 7, 8, 9, or 10 heteroatoms in addition to the intervening atom(s). In some embodiments, a formed ring is saturated. In some embodiments, a formed ring is partially unsaturated. In some embodiments, a formed ring comprises one or more aromatic ring. In some embodiments, a formed ring is bicyclic or polycyclic, and each monocyclic unit is independently 3-10 membered, saturated, partially unsaturated or aromatic and having 0-5 heteroatoms. In some embodiments, each heteroatom is independently selected from nitrogen, oxygen and sulfur.

[0381] In some embodiments, a group that can be R, e.g., R′, R^{a1}, R^{a2}, R^{a3}, R^{a5}, R^{RN}, etc., is R as described herein. Those skilled in the art appreciate that embodiments described for one group that can be R may also be utilized for another group that can be R to the extent that such embodiments fall within the definition of R.

[0382] In some embodiments, as used in the present disclosure, e.g., in various embodiments or R, R′, various formulae, etc., each heteroatom is independently selected from oxygen, nitrogen, sulfur, phosphorus and silicon. In some embodiments, each heteroatom is independently selected from oxygen, nitrogen and sulfur. In some embodiments, in provided compound each heteroatom of heteroaryl, heterocyclyl, heteroaliphatic, ring (e.g., -Cy-, ring formed by groups taken together (e.g., two R groups taken together) with their intervening atom(s) (if any), etc.), etc., is independently selected from nitrogen, oxygen and sulfur. In some embodiments, in provided compound each heteroatom is independently selected from nitrogen, oxygen, sulfur, silicon and phosphorus. In some embodiments, rings (e.g., cycloaliphatic, aryl, heteroaryl, heterocyclyl, etc. in variables (e.g., R, R′ etc.), formulae, etc.) contain 1-30 (e.g., 2-30, 1-20, 2-20, 1-15, 2-15, 1-10, 2-10, 1-6, 2-6, etc.) ring carbon atoms and 0-15 (e.g., 0, 1-15, 0-10, 0-5, 1-10, 1-5, etc.) ring heteroatoms. In some embodiments, rings contain 1-20 ring carbon atoms and 0-10 ring heteroatoms. In some embodiments, rings contain 2-20 ring carbon atoms and 0-10 ring heteroatoms. In some embodiments, rings contain 1-10 ring carbon atoms and 0-5 ring heteroatoms. In some embodiments, rings contain 2-10 ring carbon atoms and 0-5 ring heteroatoms. In some embodiments, rings contain 2-10 ring carbon atoms and 0-5 ring heteroatoms independently selected from nitrogen, oxygen and sulfur. In some embodiments, rings formed by groups taken together (e.g., two R groups taken together) contain, in addition to the intervening atom(s) of such groups, 1-20 (e.g., 1-15, 1-10, 1-5, etc.) additional ring carbon atoms and 0-10 (e.g., 0, 1-10, 0-5, 1-5, etc.) additional ring heteroatoms. In some embodiments, such rings contain 1-15 additional ring carbon atoms and 0-5 ring heteroatoms. In some embodiments, such rings contain 1-10 additional ring carbon atoms and 0-5 ring heteroatoms. In some embodiments, each ring heteroatom is independently selected from nitrogen, oxygen and sulfur. As described herein, various groups may be optionally substituted. Substituents are routinely utilized in chemistry including in development of various therapeutics. Many substituents can be utilized in accordance with the present disclosure. In some embodiments, a substituent is a hydrocarbon group. In some embodiments, a substituent comprises a heteroatom. In some embodiments, a substituent comprises multiple heteroatoms. In some embodiments, each atom in a substituent is independently selected from hydrogen, carbon, halogen, nitrogen, oxygen, sulfur, phosphorus and silicon. In some embodiments, each atom in a substituent is independently selected from hydrogen, carbon, halogen, nitrogen, oxygen, and sulfur. In some embodiments, each atom in a substituent is independently selected from hydrogen, carbon, fluorine, chlorine, bromine, iodine, nitrogen, oxygen, and sulfur. In some embodiments, the total number of carbon and non-halogen heteroatom(s) in a substituent is about or no more than about 1; in some embodiments, it is no more than about 2; in some embodiments, it is no more than about 3; in some embodiments, it is no more than about 4; in some embodiments, it is no more than about 5; in some embodiments, it is no more than about 6; in some embodiments, it is no more than about 7; in some embodiments, it is no more than about 8; in some embodiments, it is no more than about 9; in some embodiments, it is no more than about 10; in some embodiments, it is no more than about 11; in some embodiments, it is no more than about 12; in some embodiments, it is no more than about 13; in some embodiments, it is no more than about 14; in some embodiments, it is no more than about 15; in some embodiments, it is no more than about 20. In some embodiments, the total number of carbon and non-halogen heteroatom(s) in each substituent is independently no more than about 20. In some embodiments, the total number of carbon and non-halogen heteroatom(s) in each substituent is independently no more than about 15. In some embodiments, the total number of carbon and non-halogen heteroatom(s) in each substituent is independently no more than about 10. In some embodiments, the total number of carbon and non-halogen heteroatom(s) in each substituent is independently no more than about 6.

[0383] Certain amino acids and structure moieties are described in WO 2022/020651, WO 2022/020652, and WO 2022/261257, the amino acids and structure moieties of each of which are independently incorporated herein by reference, and can be utilized in accordance with the present disclosure.

[0384] In some embodiments, an amino acid, or a structure moiety, of an amino acid or an agent (e.g., a peptide), is selected from below. A N-terminal cap (N-Term) is connected via R₁ to the amino group (R₁) of the first amino acid (AA1). In some embodiments, a N-Term cap may be properly considered as part of AA1. From there, each carboxylate (R₂) of that amino acid is connected to the amino group (R₁) of the subsequent amino acid, until the carboxylate (R₂) of the final amino acid is connected to R₁ of a C-terminal group. For any amino acid that has a branch point (R₃) and a branching monomer is indicated in brackets, R₁ of the monomer in brackets is attached to R₃ of the amino acid. Unless otherwise noted, for the amino acid Dap, with two potential branch points (R₃ and R₄), if two branches are indicated, the R₁ of the first branch is connected to R₃, and R₁ of the second branch connected to R₄; in some embodiments, only one branch is indicated and R₄ is —H. For any pair of amino acids that terminate in a *3 designation, the R₃ groups of each of those amino acids are linked to each other. Likewise, for any pair of amino acids that terminate in a **3 designation, the R₃ groups of those amino acids are linked to each other. For any sequence that contains a pair of branching amino acids with R₃ groups, and one contains a branching monomer that contains both R₁ and R₂ groups, then R₁ is attached to the branching amino acid adjacent to it in the sequence, and the R₂ group of the branching monomer is attached to R₃ of the amino acid with no branching monomer designated. For example, in various peptides that have one of Cys, hCys, Pen, or aMeC at position 10 and also one of Cys, hCys, Pen, or aMeC at position 14, and a branching group off of the amino acid residue 10, the R₁ of that branching group is tied to the R₃ of the amino acid residue at position 10, while the R₂ of that branching group is tied to the R₃ of the amino acid residue at position 14. For any amino acid which has a branching amino acid containing R₃ and nothing attached to it by the above, then R₃=H. Typically, all residues with terminal olefins are linked (stapled) by ring-closing metathesis. Certain examples are provided in Table E2 and Table E3. In some embodiments, the present disclosure provides agents, e.g., peptides such as stapled peptides, comprising one or more amino acid residues selected from below.

TABLE A-IV
Certain useful compounds or moieties.

| Compound/ | |
|---|---|
| Bracket Moiety | Structure |
| Ala | |
| Gly | |
| Cys | |
| His | |
| Asp | |
| Ile | |
| Glu | |
| Lys | |
| Phe | |
| Leu | |
| nLeu | |
| Arg | |
| Asn | |
| Ser | |
| Pro | |
| Thr | |
| Gln | |
| aThr | |
| GlnR | |
| Val | |
| Trp | |
| 4F3MeF | |
| Tyr | |
| Npg | |
| MePro | |
| Aib | |
| PL3 | |
| Cpg | |
| B5 | |
| Cbg | |
| PyrS2 | |
| CyLeu | |
| BztA | |
| Orn | |
| 3Thi | |
| Dab | |
| 2Thi | |
| TriAzLys | |
| 2F3MeF | |
| TriAzOrn | |
| sAla | |
| TfeGA | |
| sAbu | |
| iPrLys | |
| sCH2S | |
| MeAsn | |
| dLys | |
| hGlnR | |
| dOrn | |
| 2OH3COOHF | |
| DGlnR | |
| 4OH3COOHF | |
| DAsnR | |
| TriAzDap | |
| 3COOHF | |
| 4COOHF | |
| Hse | |
| 2COOHF | |
| Cha | |
| 5F3Me2COOHF | |
| 4F3Me2COOHF | |
| Cba | |
| 5F3Me3COOHF | |
| SbMeAsp | |
| 4F3MeCOOHF | |
| RbMeAsp | |
| 3F2COOHF | |
| 2FurA | |
| dGlu | |
| 2OMeF | |
| hTyr | |
| 2MeF | |
| 3cbmf | |
| 2BrF | |
| MorphNva | |
| 2ClF | |
| R4 | |
| 2CNF | |
| R5 | |
| 2NO2F | |
| R6 | |
| 2PyrA | |
| CypA | |
| 3PyrA | |
| Chg | |
| 4PryA | |
| Pff | |
| 3BrF | |
| DiethA | |
| 34MeF | |
| 4PipA | |
| 34ClF | |
| Abu | |
| Phg | |
| Nva | |
| DipA | |
| hLeu | |
| OctG | |
| Cpa | |
| F2PipNva | |
| MorphGln | |
| Aad | |
| 1NapA | |
| hPhc | |
| 2NapA | |
| hnLeu | |
| Me2Gln | |
| 2cbmf | |
| AcLys | |
| dOrn | |
| Met2O | |
| dDab | |
| Acp | |
| MeOrn | |
| 2Cpg | |
| Dap | |
| aMeL | |
| 4FF | |
| DaMeL | |
| 4ClF | |
| aMeV | |
| 4BrF | |
| aMeS | |
| 4CNF | |
| DaMeS | |
| 4MeF | |
| aMeF | |
| 3FF | |
| aMeDF | |
| 3ClF | |
| dAla | |
| 3BrF | |
| dLeu | |
| 3OMeF | |
| OAsp | |
| 3MeF | |
| Sar | |
| 3CNF | |
| NMebAla | |
| 2FF | |
| Aic | |
| [BzAm2OAllyl] | |
| RbiPrF | |
| [oXyl] | |
| SbiPrF | |
| [mXyl] | |
| RbiPrDF | |
| [pXyl] | |
| RbMeXylA | |
| [4FB] | |
| RbMeXylDA | |
| [8FBB] | |
| SbMeXylA | |
| [CH2CMe2CO2H] | |
| SbMeXylDA | |
| [NHEt] | |
| AzLys | |
| [29N2spiro- undecane] | |
| AllylGly | |
| [39N2spiro- undecane] | |
| [CyCO] | |
| [4mampiperidine] | |
| [Piv] | |
| [4aminopiperidine] | |
| [Phc] | |
| [diaminobutane] | |
| [Bn] | |
| NH2 | |
| [3butenyl] | |
| OH | |
| [Allyl] | |
| dAlaol | |
| [5hexenyl] | |
| Alaol | |
| [4pentenyl] | |
| Serol | |
| [3_3-biph] | |
| Prool | |
| [2_6-naph] | |
| Throl | |
| 4TriA | |
| [2COOH4NH2Ph] | |
| 3F3MeF | |
| [2COOH4NO2Ph] | |
| AsnR | |
| [2COOHPh] | |
| aMeDAsp | |
| [2Nic] | |
| [isophthalate] | |
| [2OxoPpz] | |
| [succinate] | |
| [3C] | |
| [Me2MaI] | |
| [3Py] | |
| [diphenate] | |
| [4AcMePip | |
| [Biphen33COOH] | |
| [4CF3PhAc | |
| ThioPro | |
| [4F3CPip] | |
| [4MePpzPip] | |
| [EtSSEt] | |
| ]4Pippip] | |
| [EtSSHex] | |
| ]4PyPip] | |
| [EtSSPh] | |
| [Ac] | |
| [EtSSpy] | |
| [AcPpz] | |
| [H4IAP] | |
| [bismethoxy- ethylamine] | |
| [isoindoline] | |
| [Bn] | |
| [lithocholate] | |
| [CCpCO2H] | |
| [PEG2] | |
| [CF3CO] | |
| [Me] | R₁— |
| [CH2CChCO2H] | |
| [Me2diaminobutane] | |
| [CH2CCpCO2H] | |
| [Me2NCBz] | |
| [CH2CH2CO2H] | |
| [Me2Npr] | |
| [CH2CMe2CO2H] | |
| [Me2NPrPip] | |
| [CH2CO2H] | |
| [Me3AdamantC] | |
| [CH2NMe2] | |
| [MeMorphBz] | |
| [CH2Ppz] | |
| [MePipAc] | |
| [CMe2CO2H] | |
| [MeSO2] | |
| [CyPr] | |
| [Morph] | |
| [Et] | |
| [MorphAc] | |
| [EtSO2Ppz] | |
| [MorphCH2] | |
| [MorphEt] | |
| 2F3MeW | |
| [NdiMeButC] | |
| 2NH2F | |
| [NHBn] | |
| 34ClF | |
| [NHEt] | |
| 34MeF | |
| [NMe2] | |
| 3Br4FF | |
| [PfbGA] | |
| 3BrF | |
| [Pfbn] | |
| [3CBMF] | |
| [PfBz] | |
| 3CH2NMe2F | |
| [PfPhAc] | |
| 3CO2PhF | |
| [Ph] | |
| 3SF | |
| [Phc] | |
| 3SO2F | |
| [Pic] | |
| 3TzF | |
| [Ppz] | |
| 4BrF | |
| [RDMAPyr] | |
| 4ClBztA | |
| [Red] | |
| 4ClW | |
| [sBu] | |
| 4F3COOHF | |
| [SO2MorphCH2] | |
| 4FW | |
| [Tfb] | |
| 4SEF | |
| [TfePpz] | |
| 4TzF | |
| [Tfp] | |
| 5F3MeCOOHF | |
| 5IndA | |
| BzAm3Oallyl | |
| 5iPr3COOHF | |
| Cba | |
| 7AzaW | |
| Cbg | |
| 7ClBztA | |
| ClAc | |
| 7FBztA | |
| CO | |
| AcAsp | |
| CO2Bu | |
| AcLys | |
| CO2Hex | |
| AspE | |
| CO2iBu | |
| AspSH | |
| CO2Me | |
| Az2 | |
| CO2Ph | |
| Az3 | |
| Cpg | |
| B3 | |
| CyLeu | |
| B4 | |
| dAla | |
| B6 | |
| dIle | |
| bMe2Asp | |
| dLeu | |
| Bn3OAllyl | |
| F2PipAbu | |
| BnBoroleK | |
| F2PipNva | |
| Bnc | |
| GA | |
| BrAc | |
| GAbu | |
| BzAm2Allyl | |
| GlnR | |
| GluE | |
| NMebAla | |
| GluSH | |
| Npa | |
| hhLeu | |
| PAc3OAllyl | |
| HypBzEs3OAllyl | |
| ProAm5 | |
| HypEs4 | |
| ProAm6 | |
| HypEs5 | |
| ProBzAm3OAllyl | |
| HypPAc3OAllyl | |
| ProPAc3OAllyl | |
| Me2Asn | |
| PropynOH | |
| Me2Gln | |
| ProSAm3 | |
| MeAsn | |
| PyrR | |
| MeGln | |
| PyrR2 | |
| MePpzAbu | |
| PyrS4 | |
| MePpzAsn | |
| R2COOPipA | |
| MePpzNva | |
| R3COOPipA | |
| MePro | |
| RbMe2NapA | |
| Met2O | |
| RbMeBztA | |
| MorphAbu | |
| RbOHAsp | |
| MorphAsn | |
| S2COOPipA | |
| MorphGlN | |
| S3COOPipA | |
| MorphNva | |
| sAc | |
| sAla | |
| SPip2 | |
| Sar | |
| Spip3 | |
| SbMe2NapA | |
| sPr | |
| SbMeBztA | |
| TriAzDap | |
| sBut | |
| TriAzDab | |
| SeNc5 | |
| TriAzLys | |
| Spip1 | |
| TriAzdLys | |
| BiotinPEG8 | |

Table A-IV (Continued; certain moieties may be presented in [ ])
Certain moieties useful as, e.g. Lys analogs, branch point amino acid residues, or non-RCM stapling amino acid residues

| | |
|---|---|
| sAla | sAbu |
| sCH2S | dLys |
| dOm | DGlnR |
| DAsnR | dOrn |
| dDab | iPrLys |
| TriAzDap | 4PipA |
| GlnR | AsnR |
| NMeOrn | Dap |
| hGlnR | Orn |
| Dab | TriAzLys |
| TriAzOrn | Acp |
| AmPhe | 4AmPhe |
| Pen | 1MeK |
| hGlnR | AsnEDA |
| GlnEDA | AsnPpz |
| GlnPpz | GlnR3APyr |
| GlnS3APyr | GlnMe2EDA |
| AsnMe2EDA | AsnMeEDA |
| AsnR3APyr | AsnS3APyr |
| PyrRA | PyrSa |

hCysOx
Certain moieties useful as, e.g., stapling amino acid residues (e.g., RCM for other stapling technologies)

| | |
|---|---|
| PL3 | B5 |
| PyrS2 | PyrS3 |
| PyrS | PyrS1 |
| R4 | R5 |
| R6 | R7 |
| R8 | B4 |
| B3 | B6 |
| RgN | SgN |
| RdN | SdN |
| ReN | SeN |
| S4 | S5 |
| S6 | S7 |
| S8 | Az |
| SeNc5 | AllylGly |
| PyrS4 | PyrS5 |
| PyrR2 | PyrR |
| PyrSc72RMe3SOMe | Az2 |
| Az3 | SPip2 |
| SPip3 | PyrSc72SMe3ROMe |
| PyrSc7 | PyrSc73Me2 |
| DapAc7 | PyrSc7O45RMe |
| PyrSc7O45SMe | PyrSaA3Butene |
| PyrSadA3Butene | Dap7Gly |
| Dap7Pent | DapAc7EDA |
| DapAc7PDA | Dap7Abu |
| 4VinylPyrSa | 3allyloxyPyrSa |
| PyrSaV3Butene | PyrSadV3Butene |
| PyrSaSar3Butene | PyrSaNip3Butene |
| PyrSadNip3Butene | PyrSaPro3Butene |
| PyrSa4VinMe2PhAc | 3allylPyrSa |

Certain moieties useful as, e.g., aromatic amino acid residues

| | |
|---|---|
| 4F3MeF | BztA |
| 3Thi | 2Thi |
| 2F3MeF | 3COOHF |
| 2OH3COOHF | 4OH3COOHF |
| Pff | 3cbmf |
| 4COOHF | 2COOHF |
| 4F3Me2COOHF | 5F3MeCOOHF |
| 4F3Me3COOHF | 3F2COOHF |
| 5F3Me2COOHF | 2FurA |
| 2OMeF | 2MeF |
| 2BrF | 2ClF |
| 2CNF | 2NO2F |
| 2PyrA | 3PyrA |
| 4PyrA | 3BrF |
| 34MeF | 34ClF |
| Phg | DipA |
| 2cbmf | 1NapA |
| 2NapA (2Nal) | 4FF |
| 4ClF | 4BrF |
| 4CNF | 4MeF |
| 3FF | 3ClF |
| 3BrF | 3OMeF |
| 3MeF | 3CNF |
| 2FF | Aic |
| RbiPrF | SbiPrF |
| RbiPrDF | RbMeXylA |
| RbMeXylDA | SbMeXylA |
| SbMeXylDA | 4cbmf |
| 6F1NapA | Qui |
| 5MeOW | 345FF |
| 34FF | WCHO |
| 3F3MeF | 4F3MeF |
| 245FF | 1MeH |
| tetz | 3MeH |
| 4Thz | 5ClW |
| 6ClW | 1MeW |
| 6FW | 6ClaMeW |
| 5ClW | d1NapA |
| d2NapA | CF3Tyr |
| 34OMeF | 24MeF |
| h4PyrA | 6CNW |
| 6MeW | 6FW |
| 3FTyr | 35BrY |
| 3ClY | 3NO2Y |
| OTrp | c6Phe |
| 3BOH2F | 4BOH2F |
| 7FBztA | 7ClBztA |

7MeBztA
Certain moieties useful as amino acid residues

| | |
|---|---|
| Ala | Cys |
| Asp | Glu |
| Phe | Gly |
| His | Ile |
| Lys | Leu |
| Met | Asn |
| Pro | Gln |
| Arg | Ser |
| Thr | Val |
| Trp | Tyr |

Certain moieties useful as, e.g., amino acid residues (e.g., D-amino acid residues, homologated amino acid
residues, alkyl (e.g., methyl) amino acid residues, etc.)

| | |
|---|---|
| MePro | dGlu |
| hTyr | hLeu |
| aMeL | DaMeL |
| hPhe | Sar |
| dPro | aMeV |
| aMeS | DaMeS |
| aMeF | aMeDF |
| dAla | dLeu |
| aMeDAsp | NMeS |
| aMeW | dPhe |
| SDMA | ADMA |
| hArg | hhSer |
| hhLeu | hCys |

aMeC
Certain moieties useful as, e.g., amino acid residues (e.g., alkyl amino acid residues, hydrophobic amino acid residues, etc.)

| | |
|---|---|
| Npg | Aib |
| Cpg | Cbg |
| CyLeu | Cha |
| nLeu | Chg |
| Tle | NMebAla |
| OctG | DiethA |
| Cba | Abu |
| Nva | Cpa |
| 2Cpg | hnLeu |
| CypA | Abu |
| alle | F3CA |
| HF2CA | Ppg |
| hCba | hCypA |
| hCha | Nip |
| dNip | 4Abu |

NHPent
Certain moieties useful as, e.g., amino acid residues (e.g., polar amino acid residues, basic amino acid residues, etc.)

| | |
|---|---|
| aThr | Hse |
| Me2Gln | Met2O |
| MeAsn | S(OMe) |
| AcLys | MorphGln |
| TOMe | MorphNva |
| AzLys | F2PipNva |

Cit
Certain moieties useful as, e.g., amino acid residues (e.g., acidic amino acid residues, non-aromatic amino acid residues, etc.)

| | |
|---|---|
| isoDAsp | RbGlu |
| SbGlu | SbMeAsp |
| RbMeAsp | Aad |
| TfeGA | OAsp |
| EtGA | PyrSaa |
| bMe2Asp | [Malonate]Dap |
| [Me2Mal]Dap | [RaiPrSuc]Dap |
| [SaiPrSuc]Dap | [SaMeSuc]Dap |

[Succinate]Dap
Certain moieties (e.g., moieties utilized in [ ] in various agents)

| | |
|---|---|
| CyCO | Piv |
| Phc | Bn |
| 5hexenyl | 4pentenyl |
| 3_3-biph | 2_6-naph |
| BzAm2OAllyl | oXyl |
| mXyl | pXyl |
| 4FB | 8FBB |
| CH2CMe2CO2H | NHEt |
| 29N2spiroundecane | 39N2spiroundecane |
| 4mampiperidine | 4aminopiperidine |
| diaminobutane | NH2 |
| OH | dAlaol |
| Alaol | Serol |
| Prool | Throl |
| isophthalate | Tf |
| 35CF3PhPr | 1NapPr |

BiotinPEG8

| | |
|---|---|
| succinate | Me2Mal |
| diphenate | Biphen33COOH |
| Bip | Acryl |
| 22PhPr | F3CCro |
| MeSO2 | NHiPr |
| NHnPr | NHCyPr |
| NHCyBu | NHMe |
| MorphAc | MePipAc |
| Ac | CIAc |
| IAc | MeBipipAc |
| 4MePipBz | MeMorphBz |
| Me2NCBz | mPEG2 |

```
  mPEG4
  mPEG6
  mPEG8
```

| | |
|---|---|
| Bua | Hex |
| C2Mal | Oct |
| AdamantC | Me3AdamantC |
| AdamantPro | 6AmHex |
| Leuol | Pheol |
| C3Mal | ES |
| 3MPA | 5Pnyl |
| isovaleryl | 2PyBu |
| 1lmidac | 2F2PyAc |
| 2lAPAc | 124TriPr |
| 6QuiAc | 3PyAc |
| 123TriAc | 1PyrazoleAc |
| 4PyPrpc | 3PyPrpc |
| 5PymAc | 1PydoneAc |
| 124TriAc | 3IAPAc |
| Me2NAc | 4MePipzPrpC |
| Melmid4SO2 | 8QuiSO2 |
| PfBn | Tfb |
| mPyr | C3 |
| mPEG16 | mPEG24 |
| mPEG37 | CH2CO2H |
| SaiPrSuc | RaiPrSuc |
| SaMeSuc | Red |
| 33Oxe | IsoE |
| 13Ac | m5Meb |
| m5Pyr | m5OMeb |

Certain moieties (e.g., moieties utilized in [ ] in various agents, amino acid residues, etc.)

| | |
|---|---|
| NPyroR3 | C3a |
| isobutyryl | Cpc |
| Cbc | CypCO |
| 2PyCypCO | 4THPCO |
| 2NH2F | Bnc |

```
  BiPh
  PEG4triPEG16
  PEG4triPEG36
```

| | |
|---|---|
| diaminopentane | diaminopropane |
| diaminobutane | malonate |
| Me2diaminohexane | Me2ethylenediamine |
| 15PyraPy | 2FPhc |
| 3Phc3 | 4PymCO |
| 5PymCO | 8IAP |
| MeOPr | Ts |
| ethylenediamine | 2PyzCO |
| 2PhF | Ala_D3 |
| CyhLeu | Dpg |
| HepG | HexG |
| NAsp | NGlu |
| 2AmMePhe | 3AmMePhe |
| 4AmMePhe | 24FF |
| 46ClW | 4CNW |
| 5MeW | 5Pnyl |
| 6FlW | 7ClW |
| 7MeW | PyrR3 |
| 2IAPAc | 6QuiAc |
| 2PyBu | 34FF |
| Az1 | Az |
| 46ClW | CF3CO |
| 6QuiAc | 124TriAc |
| 5PymAc | 2PyCypCO |
| 2PyzCO | 124TriPr |
| 2PyAc | 2PyPrpc |
| 3PyPrpc | 4PyPrpc |
| PhOPr | Me2MeOPr |
| Me2NPr | NdiMeButC |
| 3IAPAc | 15PyraPy |
| MorphAc | Nic |
| 5PymCO | 1MeK |
| dPEG2 | Oct |

```
  PEG8
  C18
```

| | |
|---|---|
| GlnPDA | GlnBDA |
| GlnMePDA | GlnMe2BDA |
| GlnMeBDA | Gln5DA |
| Gln6DA | GlnT4CyMe |
| AcLys | GlnC4CyMe |
| Gln3ACPip | GlnPipAz |
| lithocholate | Gln4Pippip |
| GlnPip4AE | S3MePyrSc7 |
| R3MePyrSc7 | S3iPrPyrSc7 |
| R3iPrPyrSc7 | 3FPyr2c |
| 5ClW | 6ClW |
| 4FPyr3c | 2PymCO |
| 3PydCO | TzPyr |

[0385] In some embodiments, within a bracket there are two moieties, e.g., [Ac-dPEG2], typically R₁ of the first is connected to R₁ of the latter. For example, in [Ac-dPEG2], R₁ of Ac is connected to R₁ of dPEG2. R₂ of dPEG2 can be connected to other moieties, e.g., in [Ac-dPEG2]-Lys, R₃ of Lys.

[0386] In some embodiments, the present disclosure provides an agent, e.g., a peptide agent (in various embodiments, a stapled peptide agent), comprising a moiety selected from the table above. In some embodiments, a residue is stapled, e.g., forming a staple with another moiety. In some embodiments, an agent comprises a staple formed between two moieties each independently selected from the table above. In some embodiments, a staple comprises a double bond. In some embodiments, a staple comprises an E double bond. In some embodiments, a staple comprises a Z double bond. In some embodiments, a double bond is converted into another moiety, e.g., to a saturated bond through hydrogenation, an epoxide through epoxidation, etc. In some embodiments, a moiety, e.g., an amino acid residue, comprises two groups that can be utilized for stapling. In some embodiments, an amino acid residue comprises two groups for stapling, e.g., B3, B4, B5, B6, Dap7Gly, Dap7Pent, DapAc7EDA, DapAc7PDA, Dap7Abu, etc. In some embodiments, a N-terminal group, e.g., 4pentenyl, 5hexenyl, etc., may be considered as part of the first amino acid residue for stapling. In some embodiments, amino acid residues with N-terminal groups (e.g., 4pentenyl, 5hexenyl, etc.) such as 4pentenyl-PL3, 5hexenyl-PL3, etc., comprise two groups, e.g., two double bonds, for stapling. In some embodiments, a group for stapling is a double bond. In some embodiments, each group for stapling is independently a double bond. In some embodiments, a group for stapling is a double bond and the other is not (e.g., amino group, or a group which is or comprises R₃). In some embodiments, an agent comprise one and no more than one residue comprising two or more residues for stapling. In some embodiments, an agent comprising one and no more than one amino acid residue that is bonded to two staples. In some embodiments, agents comprise staples having different types of structures and/or formed by different types of transformations. For example, in some embodiments, an agent comprises a staple whose formation does not comprises an olefin metathesis transformation and/or modification of a carbon-carbon double bond (e.g., hydrogenation). In some embodiments, such agents may provide improved properties, activities, design flexibility, manufacturing efficiency, etc.

[0387] In some embodiments, a compound has a structure selected from the table above, wherein R₁ is —OH. In some embodiments, a compound has a structure selected from the table above, wherein R₁ is —H. In some embodiments, a compound is a compound has the structure selected from the table above, wherein R₁ is —H or amino protecting group (e.g., Fmoc, tBoc, etc.) and R₂ is —OH, a carboxyl protecting or activating group, or a salt thereof. In some embodiments, a compound is a compound has the structure selected from the table above, wherein R₁ is —H or amino protecting group and R₂ is —OH, or a salt thereof. In some embodiments, a compound is a compound has the structure selected from the table above, wherein R₁ is —H and R₂ is —OH, or a salt thereof. In some embodiments, a compound is a compound has the structure selected from the table above, wherein R₁ is —H, R₂ is —OH and R₃ is —H, or a salt thereof. In some embodiments, R₃ is —H or a protecting group. In some embodiments, R₃ is —H. In some embodiments, a compound has a structure selected from the table above, wherein R₁ is an amino protection group, e.g., Fmoc, tBoc, etc. In some embodiments, a compound has a structure selected from the table above, wherein R₁ is an amino protecting group, e.g., Fmoc, tBoc, etc., and R₂ is —OH, or —COR₂ is an optionally substituted, protected or activated carboxyl group. In some embodiments, R₂ is —OH. In some embodiments, an amino acid residue has a structure selected from the table above, wherein each of R₁ and R₂ independently represents a connection site (e.g., for structure

the residue is of the structure

In some embodiments, an agent, a peptide or a stapled peptide comprises such an amino acid residue.

[0388] Among other things, the present disclosure provides peptides, including stapled peptides, comprising residues of amino acids described herein. In some embodiments, the present disclosure provides various methods comprising utilizing amino acids, optionally protected and/or activated, as described herein. In some embodiments, the present disclosure provides methods for preparing peptides, comprising utilizing amino acids, typically protected and/or activated, as described herein. For example, in some embodiments, various amino groups are Fmoc protected for peptide synthesis (particularly for forming backbone peptide bonds). In some embodiments, various side chain carboxylic acid groups are t-Bu protected (—C(O)—O-tBu).

[0389] In some embodiments, an agent, e.g., a peptide, a stapled peptide, a stitched peptide, etc., is less than about 5000 Daltons in mass. In some embodiments, an agent is greater than or equal to about 900 Daltons and less than about 5000 Daltons in mass. In some embodiments, an agent is greater than or equal to about 1500 Daltons and less than about 5000 Daltons in mass. In some embodiments, an agent is greater than or equal to about 2000 Daltons and less than about 5000 Daltons in mass. In some embodiments, an agent is greater than or equal to about 2500 Daltons and less than about 5000 Daltons in mass. In some embodiments, an agent is greater than or equal to about 1000 Daltons and less than about 3000 Daltons in mass. In some embodiments, an agent is greater than or equal to about 1500 Daltons and less than about 3000 Daltons in mass. In some embodiments, an agent is greater than or equal to about 1500 Daltons and less than about 2500 Daltons in mass. In some embodiments, an agent is greater than or equal to about 1600 Daltons and less than about 2200 Daltons in mass. In some embodiments, the agent is no more than about 900 Daltons in mass. In some embodiments, an agent is no more than about 500 Daltons in mass. In some embodiments, an agent is no more than about 300 Daltons in mass. In some embodiments, an agent is no more than about 200 Daltons in mass.

### Characterization

[0390] In some embodiments, agents, e.g., peptides, are characterized with respect to, for example, one or more characteristics such as binding characteristics—e.g., with respect to a particular target of interest (e.g., beta-catenin or a portion thereof), stability characteristics, for example in solution or in dried form, cell permeability characteristics, solubility, lipophilicity, etc.

[0391] In some embodiments, a binding characteristic may be or comprise specificity, affinity, on-rate, off-rate, etc, optionally under (or over a range of) specified conditions such as, for example, concentration, temperature, pH, cell type, presence or level of a particular competitor, etc.

[0392] As will be appreciated by those skilled in the art, assessments of characteristics as described herein may involve comparison with an appropriate reference (e.g., a positive or negative control) which may, in some embodiments, be a contemporaneous reference or, in some embodiments, a historical reference.

[0393] In some embodiments, desirable characteristics may be, for example: binding to a desired target (e.g., a dissociation constant (K_{D}) of at least less than about 1 uM, and preferably a K_{D} of less than about 50 nM); cell penetration (e.g., as measured by fluorescence-based assays or mass spectrometry of cellular fractions, etc.); solubility (e.g., soluble at less than about 1000 uM agent, or soluble at less than about 500 uM agent, or soluble at less than about 100 uM agent, or less than about 50 uM, or less than about 35 uM); activity (e.g., modulating one or more functions of a target, which may be assessed in a cellular reporter assay (e.g., with an IC50 of less than a concentration, e.g., less than about 1 μM, less than about 500 nM, less than about 50 nM, less than about 10 nM, etc.), an animal model (e.g., various animal models described in the Examples) and/or a subject; stability, which may be assessed using a number of assays (e.g., in a rat pharmacokinetic study (e.g., administered via oral, iv, ip, etc.) with a terminal half-life of greater than a suitable time, e.g., 1 hour); low toxicity, which might be assessed by a number of assays (e.g., a standard ADME/toxicity assays); and/or low levels of cytotoxicity (e.g., low levels of lactate dehydrogenase (LDH) released from cells when treated at a suitable concentration, e.g., about 10 UM of a peptide). In some embodiments, an agent of the invention comprises an affinity of less than about 10 nM, for example, an IC50 of 7 nM).

[0394] In some embodiments, provided agents can bind to targets, e.g., beta-catenin, with an EC 50 of no more than about 2000 nM. In some embodiments, an EC50 is no more than about 1500 nM. In some embodiments, an EC50 is no more than about 1000 nM. In some embodiments, an EC50 is no more than about 500 nM. In some embodiments, an EC50 is no more than about 300 nM. In some embodiments, an EC50 is no more than about 200 nM. In some embodiments, an EC50 is no more than about 100 nM. In some embodiments, an EC50 is no more than about 75 nM. In some embodiments, an EC50 is no more than about 50 nM. In some embodiments, an EC50 is no more than about 25 nM. In some embodiments, an EC50 is no more than about 10 nM. In some embodiments, an EC50 is no more than about 5 nM. In some embodiments, an EC50 is measured by fluorescence polarization as described in the Examples.

[0395] In some embodiments, the present disclosure provides agents, e.g., stapled peptides, with suitable solubility for various purposes. In some embodiments, solubility of provided agents, e.g., in PBS, is about or at least about 5-100 uM (e.g., about or at least about 5, 10, 15, 20, 25, 30, 40, 50, 60, 70, 80, 90, or 100 uM). In some embodiments, solubility is about or at least about 25 uM. In some embodiments, solubility is about or at least about 30 uM. In some embodiments, solubility is about or at least about 40 uM. In some embodiments, solubility is about or at least about 50 uM. In some embodiments, provided agents, e.g., stapled peptides, are protein bound in serum; in some embodiments, they are at least about 85%, 90%, or 95% protein bound in serum. In some embodiments, provided agents are over 95% protein bound in scrum.

[0396] In some embodiments, provided agents can traverse a cell membrane of an animal cell. In some embodiments, provided agents can traverse a cell membrane of a human cell.

[0397] Among other things, provided agents can bind to motifs, residues, or polypeptides. In some embodiments, provided agents bind to beta-catenin. In some embodiments, a dissociation constant (K_{D}) is about 1 nM to about 1 uM. In some embodiments, a K_{D} is no more than about 1 uM. In some embodiments, a K_{D} is no more than about 500 nM. In some embodiments, a K_{D} is no more than about 250 nM. In some embodiments, a K_{D} is no more than about 100 nM. In some embodiments, a K_{D} is no more than about 50 nM. In some embodiments, a K_{D} is no more than about 25 nM. In some embodiments, a K_{D} is no more than about 10 nM. In some embodiments, a K_{D} is no more than about 5 nM. In some embodiments, a K_{D} is no more than about 1 nM. As appreciated by those skilled in the art, various technologies are available and can be utilized to measure K_{D} in accordance with the present disclosure. In some embodiments, K_{D} is measured by Surface Plasmon Resonance (SPR) as illustrated herein.

[0398] In some embodiments, provided agents binds to a polypeptide whose sequence is or comprising SEQ ID NO: 2, or a fragment thereof:

(SEQ ID NO: 2)
SVLFYAITTLHNLLLHQEGAKMAVRLAGGLQKMVALLNKTNVKFL
AITTDCLQILAYGNQESKLIILASGGPQALVNIMRTYTYEKLLWT
TSRVLKVLSVCSSNKPAIVEAGGMQALGLHLTDPSQRLVQNCLWT
LRNLSDAATKQEGMEGLLGTLVQLLGSDDINVVTCAAGILSNLTC
NNYKNKMMVCQVGGIEALVRT.

[0399] In some embodiments, provided agents have one or more or all of the following interactions with beta-catenin:

Direct interactions (), water mediated ||,
non-polar contacts {}
(SEQ ID NO: 3)
LQIL{AY}(G){NQ}ES(K)LIILA
(residue 301-317 of Uniprot P35222 sequence)
(SEQ ID NO: 4)
SRVL{(K)V}LS{V]CSSN
(residue 341-353 of Uniprot P35222 sequence)
(SEQ ID NO: 5)
RLV{QN}C[L](W)TL{R}(N)LSDA
(residue 376-391 of Uniprot P35222 sequence)
(SEQ ID NO: 6)
LGSD[D]I(N){V}V{TC}AAGI
(residue 409-423 of Uniprot P35222 sequence)

[0400] In some embodiments, an agent, e.g., a peptide, binds to beta-catenin and interacts with one or more residues that are or correspond to at least two, or at least three, or at least four, or at least five, or at least six, or at least seven, or at least eight or at least nine, or at least ten, or at least eleven, or at least twelve, or at least thirteen, or at least fourteen, or at least fifteen, or at least sixteen, or at least seventeen, or at least eighteen, or at least nineteen, or at least twenty of the following amino acid residues in SEQ ID NO: 1 at the indicated positions: A305, Y306, G307, N308, Q309, K312, K345, V346, V349, Q379, N380, L382, W383, R386, N387, D413, N415, V416, T418, and C₄₁₉. In some embodiments, an agent, e.g., a peptide, binds to beta-catenin and interacts with one or more residues that are or correspond to at least two, or at least three, or at least four, or at least five, or at least six, or seven of the following amino acid residues in SEQ ID NO: 1 at the indicated positions: G307, K312, K345, W383, R386, N387, D413, and N415. In some embodiments, an agent, e.g., a peptide, binds to beta-catenin and interacts with one or more residues that are or correspond to at least two, or at least three, or at least four, or at least five, or at least six, or seven of the following amino acid residues in SEQ ID NO: 1 at the indicated positions: G307, K312, K345, W383, N387, D413, and N415.

[0401] In some embodiments, provided agents interact with beta-catenin at one or more (e.g., 1, 2, 3, 4, 5, 6, 7, 8 or 9) of G307, K312, K345, Q379, L382, W383, N387, N415 and V416. In some embodiments, provided agents interact with beta-catenin at one or more (e.g., 1, 2, 3, 4, 5, 6, 7, 8, 9 or 10) of Y306, G307, K312, K345, Q379, L382, W383, N387, N415 and V416. In some embodiments, provided agents interact with beta-catenin at one or more (e.g., 1, 2, 3, 4, 5, 6, 7, 8, 9 or 10) of G307, K312, K345, Q379, L382, W383, R386, N387, N415 and V416. In some embodiments, provided agents interact with beta-catenin at one or more (e.g., 1, 2, 3, 4, 5, 6, 7, 8, 9, 10 or 11) of Y306, G307, K312, K345, Q379, L382, W383, R386, N387, N415 and V416. In some embodiments, provided agents interact with beta-catenin at one or more (e.g., 1, 2, 3, 4, 5, 6, 7, 8, 9, 10, 11 or 12) of Y306, G307, K312, K345, V349, Q379, L382, W383, R386, N387, N415 and V416. In some embodiments, provided agents interact with beta-catenin at one or more (e.g., 1, 2, 3, 4, 5, 6, or 7) of G307, K312, K345, W383, R386, N387, D413 and N415. In some embodiments, provided agents interact with beta-catenin at one or more (e.g., 1, 2, 3, 4, 5, 6, or 7) of G307, K312, K345, W383, N387, D413 and N415. In some embodiments, provided agents interact with beta-catenin at one or both of K312 and R386. In some embodiments, provided agents interact with G307. In some embodiments, provided agents interact with K312. In some embodiments, provided agents interact with beta-catenin at one or more of K345, W383, D413 and N415. In some embodiments, provided agents interact with beta-catenin at one or more of K345 and W383. In some embodiments, provided agents interact with beta-catenin at one or more of D413 and N415. In some embodiments, provided agents interact with Y306. In some embodiments, provided agents interact with G307. In some embodiments, provided agents interact with K312. In some embodiments, provided agents interact with K345. In some embodiments, provided agents interact with V349. In some embodiments, provided agents interact with Q379. In some embodiments, provided agents interact with L382. In some embodiments, provided agents interact with W383. In some embodiments, provided agents interact with R386. In some embodiments, provided agents interact with N387. In some embodiments, provided agents interact with D413. In some embodiments, provided agents interact with N415. In some embodiments, provided agents interact with V416.

[0402] In some embodiments, provided agents interact with one or more of amino acid residues that are or correspond to K312, R386, K345 and W383 of SEQ ID NO: 1. In some embodiments, provided agents interact with one or more of amino acid residues that are or correspond to K312 and R386 of SEQ ID NO: 1. In some embodiments, interaction with an amino acid residue can be assessed through mutation of such an amino acid residue (e.g., mutation of K, R, etc. to D, E, etc.).

[0403] As those skilled in the art reading the present disclosure will appreciate, in some embodiments, interactions with beta-catenin may be assessed by contacting an agent with either a full-length or a portion of beta-catenin. In some embodiments, a portion of beta-catenin comprises the interacting residues above. In some embodiments, a portion of beta-catenin is or comprises SEQ ID NO: 2. In some embodiments, a portion of beta-catenin is expressed with a tag (e.g., for purification, detection, etc.). In some embodiments, a tag is a fluorescent tag. In some embodiments, a tag is for detection. In some embodiments, a tag is for purification and detection. In some embodiments, a tag is a purification tag. In some embodiments, a tag is or comprises biotin. Many other types of tags are available in the art and can be utilized in accordance with the present disclosure.

[0404] Various technologies can be utilized for characterizing and/or assessing provided technologies (e.g., agents (e.g., various peptides), compositions, methods, etc.) in accordance with the present disclosure. As described herein, in some embodiments, a useful technology is or comprises fluorescence polarization. In some embodiments, a useful technology assesses LogP or LogD. In some embodiments, a useful technology is or comprises a CHI LogD assay. In some embodiments, a useful technology assesses solubility. In some embodiments, a useful technology is or comprises NanoBRET. In some embodiments, a useful technology is or comprises a reporter assay (e.g., DLD1 reporter assay). In some embodiments, a useful technology is or comprises alphascreen. Certain useful protocols are described in the Examples. Those skilled in the art appreciate that suitable adjustments may be made to such protocols, e.g., according to specific conditions, agents, purposes, etc.

[0405] In some embodiments, tumor models are utilized to assess technologies. In some embodiments, a tumor model is a patient-derived tumor model. In some embodiments, a number of tumor models are utilized. In some embodiments, a number of patient-derived tumor models are utilized. In some embodiments, tumor models carry various mutations. Certain mutations are described in the Examples.

### Production

[0406] Various technologies are known in the art for producing provided agents. For example, various technologies for preparing small molecules, peptides (including stapled peptides) may be utilized in accordance with the present disclosure. Those skilled in the art, reading the present disclosure will well appreciate which such technologies are applicable in which aspects of the present disclosure in accordance with the present disclosure.

[0407] Stapling may be performed during and/or after peptide chain synthesis. In some embodiments, the present disclosure provides an unstapled peptide agent whose sequence is one described in Table E2 or Table E3. In some embodiments, amino acid residues are optionally protected for peptide synthesis (e.g., peptide synthesis using Fmoc-protected amino acids wherein certain side chains may be protected). In some embodiments, one or more stapling are achieved through olefin metathesis. In some embodiments, two or more stapling are formed through one olefin metathesis process. In some embodiments, the present disclosure provides a stapled peptide agent described in Table E2 or Table E3 or a salt thereof (e.g., a pharmaceutically acceptable salt thereof). In some embodiments, the present disclosure provides a stereoisomer of a stapled peptide agent described in Table E2 or Table E3 or a salt thereof (e.g., a pharmaceutically acceptable salt thereof). In some embodiments, the present disclosure provides a E/Z stereoisomer of a stapled peptide agent described in Table E2 or Table E3 or a salt thereof (e.g., a pharmaceutically acceptable salt thereof). In some embodiments, from the N to C direction, an olefin double bond in the first staple that comprising such a bond is Z, and an olefin double in the second staple that comprising such a bond is E (Z-E); in some embodiments, it is (Z-Z); in some embodiments, it is (E-Z); in some embodiments, it is (E-E). In some embodiments, from the N to C direction, an olefin double bond in the first (i, i+2), (i, i+3) or (i, i+4) staple that comprising such a bond is Z, and an olefin double in the first (i, i+7) staple that comprising such a bond is E (Z-E); in some embodiments, it is (Z-Z); in some embodiments, it is (E-Z); in some embodiments, it is (E-E). In some embodiments, an agent comprises an olefin double bond in a third staple, and it is E; in some embodiments, it is Z. In some embodiments, an agent comprises an olefin double bond in a fourth staple, and it is E; in some embodiments, it is Z.

[0408] In some embodiments, one or more or all staples are formed after chain extension. In some embodiments, one or more or all staples are formed during chain extension. In some embodiments, one or more or all staples by metathesis are formed after chain extension. In some embodiments, one or more or all staples by metathesis are formed during chain extension.

[0409] In some embodiments, the present disclosure provides a method, comprising
[0410] a) preparing a first compound comprising two moieties each of which independently comprises an olefin double bond;
[0411] b) providing a second compound by stapling the two moieties by olefin metathesis of an olefin double bond of one moiety with an olefin double bond of the other to form a first-formed staple;
[0412] c) add one or more additional moieties to the second compound to provide a third compound which comprising two moieties each of which independently comprises an olefin double bond; and
[0413] d) providing a fourth compound by stapling the two moieties in the third compound by olefin metathesis of an olefin double bond of one moiety with an olefin double bond of the other to form a second-formed staple.

[0414] In some embodiments, a moiety is an amino acid residue. In some embodiments, each moiety is independently an amino acid residue. In some embodiments, each moiety is independently an amino acid residue comprising a terminal olefin as described herein. In some embodiments, there are two olefin double bonds in one moiety, e.g., of the first compound. For example, in some embodiments, such a moiety is B5. In some embodiments, two moieties of a first compound is independently X⁴ and X¹¹. In some embodiments, a first-formed staple is a (i, i+7) staple. In some embodiments, a first compound comprises —X⁴X⁵X⁶X⁷X⁸X⁹X¹⁰X¹¹—. In some embodiments, a first compound comprises —X⁴X⁵X⁶X⁷X⁸X⁹X¹⁰X¹¹X¹²X¹³X¹⁴—. In some embodiments, a first compound comprises a staple. In some embodiments, a staple is a (i, i+4) staple. In some embodiments, a staple is between X¹⁰ and X¹⁴. In some embodiments, an olefin double bond in a third compound is present in the first compound (e.g., an unstapled olefin double bond of B5). In some embodiments, one and only one amino acid residue comprises an olefin double bond is added to the second compound. In some embodiments, ac third compound is or comprises —X¹X²X³X⁴X⁵X⁶X⁷X⁸X⁹X¹⁰X¹¹—. In some embodiments, a third compound is or comprises —X¹X²X³X⁴X⁵X⁶X⁷X⁸X⁹X¹⁰X¹¹X¹²X¹³X¹⁴—. In some embodiments, a first- and second-formed staples are bonded to the same amino acid residue. In some embodiments, a first- and second-formed staples are bonded to the same atom. In some embodiments, a second-formed staple is a (i, i+2), (i, i+3) or (i, i+4) staple. In some embodiments, two moieties in the third compound is independently X¹ and X⁴. In some embodiments, a first-formed staple is formed with E selectivity as described herein (e.g. about 1.1:1, 1.2:1, 1.3:1, 1.4:1, 1.5:1, 2:1, 3:1, 4:1, 5:1, 10:1, 20:1, 30:1, 40:1, 50:1, or more). In some embodiments, a second-formed staple is formed with Z selectivity as described herein (e.g., about 1.1:1, 1.2:1, 1.3:1, 1.4:1, 1.5:1, 2:1, 3:1, 4:1, 5:1, 10:1, 20:1, 30:1, 40:1, 50:1, or more). In some embodiments, synthesis may be performed on a solid support (e.g., solid phase peptide synthesis), and a compound or an agent may be on a solid support. In some embodiments, stapling during chain extension, or individually performed stapling for one or more staples, can provide advantages, e.g., increased selectivity, yield, purity, etc.

[0415] In some embodiments, two or more staples are formed in a metathesis reaction. In some embodiments, all staples formed by metathesis are formed in a metathesis reaction. In some embodiments, each of such staples are formed through olefin metathesis of terminal olefins. In some embodiments, multiple staples are formed after full lengths of peptides have been achieved. In some embodiments, one or more staples comprising double bonds are formed after full lengths of peptides have been achieved. In some embodiments, all staples comprising double bonds are formed after full lengths of peptides have been achieved. In some embodiments, one or more staples formed through metathesis are formed after full lengths of peptides have been achieved. In some embodiments, all staples formed through metathesis are formed after full lengths of peptides have been achieved.

[0416] In some embodiments, stepwise stapling, in which two or more staples are formed in two or more steps, were performed. In some embodiments, stepwise stapling provides improved levels of selectivity to form a desired product (e.g., I-66) over other compounds, e.g., stereoisomers (e.g., for I-66, I-67). In some embodiments, an improvement is about or at least about 1.5, 2, 2.5, 3, 4, 5, 6, 7, 8, 9, or 10 fold. In some embodiments, an improvement is assessed by comparing percentage of a desired product among all related stereoisomers. In some embodiments, an improvement is assessed by ratios of a desired product versus a stereoisomer (e.g., I-66 versus I-67). In some embodiments, two staples comprising olefin double bonds are formed in two separate steps. In some embodiments, two staples formed by metathesis are formed in two separate steps. In some embodiments, two staples bonded to the same amino acid residue are formed in two separate steps. In some embodiments, two staples bonded to the same atom are formed in two separate steps. In some embodiments, two staples bonded to the same carbon atom are formed in two separate steps. In some embodiments, two staples formed from B5 are formed in two separate steps. In some embodiments, a provided technologies comprise a third step forming a third staple. In some embodiments, each staple is formed in a separate step. In some embodiments, the present disclosure provides a method for preparing a stapled peptide, comprising:
[0417] 1) reacting a first reactive group with a second reactive group to form a first staple, wherein the first and second reactive groups are in two different amino acid residues; and
[0418] 2) reacting a third reactive group with a fourth reactive group to form a second staple, wherein the third and fourth reactive groups are in two different amino acid residues.

[0419] Alternatively or additionally, in some embodiments, a method comprises reacting a fifth reactive group with a sixth reactive group to form a third staple, wherein the fifth and sixth reactive groups are in two different amino acid residues. In some embodiments, a third staple is formed before a first and second staples.

[0420] In some embodiments, a first staple is formed through a metathesis reaction. In some embodiments, each of the first and second reactive groups independently is or comprises a double bond. In some embodiments, each of the first and second reactive groups is independently a terminal olefin. In some embodiments, a first staple is formed through olefin metathesis. In some embodiments, a first staple is an (i, i+7) staple. Various metathesis technologies may be utilized in accordance with the present disclosure to form a first staple. In some embodiments, a metathesis reaction is performed in the presence of a catalyst. In some embodiments, a catalyst is Hoveyda-Grubbs M720 catalyst (CAS 301224-40-8). In some embodiments, a first staple is between X⁴ and X¹¹.

[0421] In some embodiments, a second staple is formed through a metathesis reaction. In some embodiments, each of the third and fourth reactive groups independently is or comprises a double bond. In some embodiments, each of the third and fourth reactive groups is independently a terminal olefin. In some embodiments, a second staple is formed through olefin metathesis. In some embodiments, a second staple is an (i, i+3) staple. Various metathesis technologies may be utilized in accordance with the present disclosure to form a second staple. In some embodiments, a metathesis reaction is performed in the presence of a catalyst. In some embodiments, a catalyst is Grubbs M102 catalyst (CAS 172222-30-9). In some embodiments, a second staple is between X¹ and X⁴.

[0422] In some embodiments, one of the first and second reactive groups, and one of the third and fourth reactive groups, are in the same amino acid residues. In some embodiments, they are independently in a side chain and the two side chains are bonded to the same atom. In some embodiments, the two side chains are bonded to the same carbon atom, e.g., as in B5. In some embodiments, the first and second staples are bonded to the same amino acid residue. In some embodiments, they are bonded to same atom. In some embodiments, they are bonded to the same carbon, e.g., in B5.

[0423] In some embodiments, a third staple comprises an amide group, e.g., —C(O)N(R′)— wherein R′ is as described herein. In some embodiments, a third staple comprises —C(O)NH—. In some embodiments, a third staple is a (i, i+4) staple. In some embodiments, one of the fifth and the sixth reactive groups is or comprises an amino group or an activated form thereof, and the other is or comprises an acid group, e.g., a carboxyl group, or an activated form thereof. In some embodiments, a third staple is formed through an amidation reaction. In some embodiments, a third staple is not formed by a metathesis reaction. In some embodiments, a third staple does not comprise an olefin double bond. Various amidation technologies are available and may be utilized herein. As described herein, other types of staples may be utilized and constructed as well. See, for example, preparation of I-66, 1-335, etc. in the Examples. In some embodiments, a third staple is between X¹⁰ and X¹⁴

[0424] In some embodiments, as described herein, one or more stapling steps are independently performed before full lengths are achieved. For example, in some embodiments, a third staple is formed before the two amino acid residues comprising the first and second reactive groups are both installed. Alternatively or additionally, in some embodiments, a first staple is formed before the two amino acid residues comprising the third and fourth reactive groups are both installed. In some embodiments, a third staple is formed after an amino acid residue comprising one of the first and second reactive group is installed but before an amino acid residue comprising the other of the first and second reactive group is installed. In some embodiments, a first staple is formed after an amino acid residue comprising one of the third and fourth reactive group is installed but before an amino acid residue comprising the other of the third and fourth reactive group is installed. In some embodiments, two or more stapling steps are performed based on the positions of the related staples and the directions of peptide synthesis, and one or more staples closer to the starting termini are formed before one or more staples further away from the starting termini. In some embodiments, peptide synthesis is performed from C-terminus to N-terminus. In some embodiments, for a first staple and a second staple, the one that first has both related residues installed is formed first. For example, in a C-terminal to N-terminal peptide synthesis, a staple between X⁴ and X¹¹ is formed before a staple between X¹ and X⁴.

[0425] Various metal complexes or catalysts are useful for metathesis. For example, in some embodiments, a metal complex is a Grubbs catalyst. In some embodiments, it is In some embodiments, a metal complex is a Hoveyda-Grubbs catalyst. In some embodiments, it is Grubbs I M102. Hoveyda-Grubbs M720 catalyst. In some embodiments, a catalyst provides product E/Z selectivity. As appreciated by those skilled in the art, catalysts can be utilized at various suitable levels, e.g., about 1%, 2%, 3%, 4%, 5%, 10%, 20%, 25%, 30%, 40%, 50% mol or more.

[0426] In some embodiments, the present disclosure provides technologies for controlling ratio of E/Z isomers of one or more or each olefin double bond formed during olefin metathesis. In some embodiments, one or more or each olefin double bond is formed with a isomer ratio of about 1.1:1, 1.2:1, 1.3:1, 1.4:1, 1.5:1, 2:1, 3:1, 4:1, 5:1, 10:1, 20:1, 30:1, 40:1, 50:1, or more. In some embodiments, in a product composition one or more or each olefin double bond has an isomer ratio of about 1.1:1, 1.2:1, 1.3:1, 1.4:1, 1.5:1, 2:1, 3:1, 4:1, 5:1, 10:1, 20:1, 30:1, 40:1, 50:1, or more. In some embodiments, it is independently about 1.5:1 or more. In some embodiments, it is independently about 2:1 or more. In some embodiments, it is independently about 3:1 or more. In some embodiments, it is independently about 4:1 or more. In some embodiments, it is independently about 5:1 or more. In some embodiments, it is independently about 6:1 or more. In some embodiments, it is independently about 7:1 or more. In some embodiments, it is independently about 8:1 or more. In some embodiments, it is independently about 9:1 or more. In some embodiments, it is independently about 10:1 or more. In some embodiments, it is independently about 20:1 or more. In some embodiments, it is independently about 30:1 or more. In some embodiments, it is independently about 40:1 or more. In some embodiments, it is independently about 50:1 or more. In some embodiments, a ratio is E: Z. In some embodiments, a ratio is Z: E.

[0427] In some embodiments, stapling creates one or more chiral centers. For example, in some embodiments, when B5 forms two staples with two other amino acid residues, a chiral center may form. In some embodiments, a formed chiral center is R in an agent. In some embodiments, a formed chiral center is S in an agent. In some embodiments, a composition comprises both agents being R and S at a chiral center. In some embodiments, a chiral center is formed with stereoselectivity (e.g., in some embodiments, diastereoselectivity when other chiral elements are present in the same molecule). In some embodiments, the selectivity is about or at least about 60%, 65%, 70%, 75%, 80%, 85%, 90%, 95%, 98% or 99% (when selectivity is 98%, 98% of all product molecules share the same stereochemistry at the chiral center.). In some embodiments, in a composition described herein, e.g., a pharmaceutical composition, about or at least about 60%, 65%, 70%, 75%, 80%, 85%, 90%, 95%, 98% or 99% of all molecules having the same constitution and salts thereof share the same stereochemistry at a chiral center, e.g., a chiral center bonded to two staples (e.g., in B5). In some embodiments, it is about or at least about 70%. In some embodiments, it is about or at least about 75%. In some embodiments, it is about or at least about 80%. In some embodiments, it is about or at least about 85%. In some embodiments, it is about or at least about 90%. In some embodiments, it is about or at least about 95%. In some embodiments, it is about or at least about 98%. In some embodiments, it is about or at least about 99%.

[0428] In some embodiments, an olefin double bond in a staple may be further modified. In some embodiments, an olefin double bond in a staple is hydrogenated thus converting it into a single bond. In some embodiments, a modification is epoxidation. In some embodiments, a modification is halogenation. Those skilled in the art appreciate that various other modifications are suitable for olefin double and can be utilized in accordance with the present disclosure.

[0429] In some embodiments, crude product compositions are purified, e.g., through chromatography technologies such as liquid chromatography. In some embodiments, one or more product compositions are collected based on separated portions, e.g., HPLC peaks, with the correct observed mass. In some embodiments, each product composition independently corresponds to a different peak (e.g., in some embodiments, by UV detection at a suitable wavelength, e.g., 220 nm) with the correct observed mass. In some embodiments, a peak area of one or more or each product composition is independently about 5%, 10%, 20%, 30%, 40%, 50%, 60%, 70%, 80%, 90% or more of the total peak area of all peak(s) with the correct mass. In some embodiments, it is about 5% or more. In some embodiments, it is about 10% or more. In some embodiments, it is about 20% or more. In some embodiments, it is about 25% or more. In some embodiments, it is about 30% or more. In some embodiments, it is about 40% or more. In some embodiments, it is about 50% or more. In some embodiments, a product composition comprises one isomer. In some embodiments, a product composition comprises two or more isomers (e.g., those that cannot be sufficiently separated). In some embodiments, each product composition independently has a purity and/or stereopurity as described herein, e.g., in some embodiments, for one or more (e.g., 1, 2, 3, 4, 5 or more) or each olefin double bond in a staple, the ratio of the two stereoisomers is independently about 1.1:1, 1.2:1, 1.3:1, 1.4:1, 1.5:1, 2:1, 3:1, 4:1, 5:1, 10:1, 20:1, 30:1, 40:1, 50:1, 60:1, 70:1, 80:1, 90:1, 100:1 or more. In some embodiments, ratios may be assessed by NMR, HPLC, etc.

[0430] In some embodiments, as described herein, certain stapled peptides, and in particular cysteine stapled peptides, may be provided in and/or produced by a biological system and reacting with a provided reagent, e.g., one having the structure of R^{x}-L^{s2}-R^{x}, or a salt thereof, wherein R^{x} can react with —SH groups under suitable conditions. In some embodiments, each R^{x} is a suitable leaving group. In some embodiments, each R^{x} is independently —Br.

[0431] In some embodiments, peptides are prepared on solid phase on a synthesizer using, typically, Fmoc chemistry. In some embodiments, the present disclosure provides protected and/or activated amino acids for synthesis.

[0432] In some embodiments, staples are formed by olefin metathesis. In some embodiments, a product double bond of metathesis is reduced/hydrogenated. In some embodiments, CO₂ are extruded from a carbamate moiety of a staple. In some embodiments, provided stapled peptides are further modified, and/or conjugated to other entities. Conditions and/or reagents of these reactions are widely known in the art and can be performed in accordance with the present disclosure to provide stapled peptides.

[0433] Properties and/or activities of provided stapled peptides can be readily assessed in accordance with the present disclosure, for example, through use of one or more methods described in the examples.

[0434] In some embodiments, technologies for preparing and/or assessing stapled peptides include those described in U.S. Pat. No. 9,617,309, US 2015-0225471, US 2016-0024153, US 2016-0215036, US2016-0244494, WO 2017/062518, etc. In some embodiments, technologies for preparing and/or assessing stapled peptides are described in WO 2022/261257 and are incorporated herein by reference.

[0435] In some embodiments, the present disclosure provides products manufactured and/or characterized by processes and/or technologies described herein.

[0436] Provided compounds can be provided in high purity. In some embodiments, a provided compound is at least about 85%, 90%, 91%, 92%, 93%, 94%, 95%, 96%, 97%, 98%, or 99% pure. In some embodiments, provided compounds, e.g., amino acids optionally protected/activated, are essentially free of impurities, including stereoisomers.

[0437] In some embodiments, an agent may have one or more stereoisomers which may independently co-exist in a composition or preparation. In some embodiments, a provided agent has a stereopurity of about or at least about 80%, 85%, 90%, 91%, 92%, 93%, 94%, 95%, 96%, 97%, 98%, or 99%. In some embodiments, it is about or at least about 80%. In some embodiments, it is about or at least about 85%. In some embodiments, it is about or at least about 90%. In some embodiments, it is about or at least about 95%. In some embodiments, it is about or at least about 96%. In some embodiments, it is about or at least about 97%. In some embodiments, it is about or at least about 98%. In some embodiments, it is about or at least about 99%. In some embodiments, stereoisomers are essentially free from a preparation or composition (e.g., cannot be reliably observed in NMR or HPLC). In some embodiments, an agent comprises one or more staples independently comprising one or more olefin double bond. In some embodiments, stereopurity is with respect to E/Z stereoisomers. In some embodiments, for one or more (e.g., 1, 2, 3, 4, 5 or more) or each olefin double bond in a staple, the ratio of the two stereoisomers is independently about 1.1:1, 1.2:1, 1.3:1, 1.4:1, 1.5:1, 2:1, 3:1, 4:1, 5:1, 10:1, 20:1, 30:1, 40:1, 50:1, 60:1, 70:1, 80:1, 90:1, 100:1 or more. In some embodiments, it is independently about 1.5:1 or more. In some embodiments, it is independently about 2:1 or more. In some embodiments, it is independently about 3:1 or more. In some embodiments, it is independently about 4:1 or more. In some embodiments, it is independently about 5:1 or more. In some embodiments, it is independently about 6:1 or more. In some embodiments, it is independently about 7:1 or more. In some embodiments, it is independently about 8:1 or more. In some embodiments, it is independently about 9:1 or more. In some embodiments, it is independently about 10:1 or more. In some embodiments, it is independently about 20:1 or more. In some embodiments, it is independently about 30:1 or more. In some embodiments, it is independently about 40:1 or more. In some embodiments, it is independently about 50:1 or more. In some embodiments, it is independently about 60:1 or more. In some embodiments, it is independently about 70:1 or more. In some embodiments, it is independently about 80:1 or more. In some embodiments, it is independently about 90:1 or more. In some embodiments, it is independently about 100:1 or more. In some embodiments, a ratio is E: Z. In some embodiments, a ratio is Z: E. Those skilled in the art appreciate that E and Z isomers may be selectively enriched through modulating manufacturing processes, purification, staple positioning and/or lengths, etc.

[0438] In some embodiments, the present disclosure provides compounds, agents, preparations, compositions, etc., that have low metal levels. In some embodiments, the present disclosure provides compounds, agents, preparations, compositions, etc., that have low ruthenium levels. In some embodiments, the present disclosure provides compounds, agents, preparations, compositions, etc., that have low palladium levels. In some embodiments, a level is no more than about 1000, 500, 200, 100, 90, 80, 70, 60, 50, 40, 30, 20, 10, 5, 4, 3, 2, or 1 ppm (weight/weight). In some embodiments, a level is no more than about 1000 ppm. In some embodiments, a level is no more than about 500 ppm. In some embodiments, a level is no more than about 100 ppm. In some embodiments, a level is no more than about 50 ppm. In some embodiments, a level is no more than about 20 ppm. In some embodiments, a level is no more than about 10 ppm. As appreciated by those skilled in the art, various technologies can be utilized to assess metal levels. In some embodiments, a metal level, e.g., a ruthenium level, a palladium level, etc., is assessed according to USP <233>. In some embodiments, ICP-MS is utilized. In some embodiments, ICP-OES is utilized.

### Compositions

[0439] Among other things, the present disclosure provides compositions that comprise or otherwise relate to provided agents, e.g., small molecule agents, peptide agents (e.g., stapled peptides), as described herein.

[0440] In some embodiments, provided compositions are or comprise an assay system for characterizing (and optionally including) a stapled peptide as described herein.

[0441] In some embodiments, provided compositions are pharmaceutical compositions e.g., that comprise or deliver one or more provided agents. In some embodiments, an agent is in a pharmaceutically acceptable salt form.

[0442] In some embodiments, an agent is a peptide. In some embodiments, an agent is a stapled peptide. In some embodiments, an agent comprises a detectable moiety, e.g., fluorescent moiety, radioactive moiety, biotin, etc. In some embodiments, a detectable moiety is directly detectable. In some embodiments, a detectable antibody is detected indirectly, e.g., utilizing an antibody, an agent that can reacting with a detectable moiety to form a detectable product, etc.

[0443] In some embodiments, a pharmaceutical composition comprises a provided agent and a pharmaceutically acceptable excipient (e.g., carrier).

[0444] In some embodiments, a peptide composition may include or deliver a particular form (e.g., a particular optical isomer, diastereomer, salt form, covalent conjugate form [e.g., covalently attached to a carrier moiety], etc., or combination thereof) of an agent as described herein). In some embodiments, an agent included or delivered by a pharmaceutical composition is described herein is not covalently linked to a carrier moiety.

[0445] In some embodiments, multiple stereoisomers exist for an agent that contains chiral centers and/or double bonds. In some embodiments, level of a particular agent in a composition is enriched relative to one or more or all of its stereoisomers. For example, in some embodiments, a particularly configuration of a double bond (E/Z) is enrich. In some embodiments, for each double bond a configuration is independently enriched. In some embodiments, for a chiral element, e.g., a chiral center, one configuration is enriched. In some embodiments, for a chiral center bonded to two staples, one configuration is enriched. In some embodiments, for each chiral element a configuration is independently enriched. In some embodiments, for one or more or all stereochemical element (e.g., double bonds, chiral element, etc.), one configuration is independently enriched. In some embodiments, for each double bond in each staple, one configuration is independently enriched. In some embodiments, for each double bond in each staple, one configuration is independently enriched, and for a chiral center bonded to two staples, one configuration is enriched. In some embodiments, enrichment for each double bond is independently E or Z. In some embodiments, enrichment for each chiral element is independently R or S. In some embodiments, enrichment for each stereochemical element, e.g., double bond, chiral center, etc., is about or at least about a certain level, e.g., 60%, 65%, 70%, 75%, 80%, 85%, 90%, 91%, 92%, 93%, 94%, 95%, 96%, 97%, 98%, or 99% (percentage of an agent). In some embodiments, about or at least about a certain level, e.g., 60%, 65%, 70%, 75%, 80%, 85%, 90%, 91%, 92%, 93%, 94%, 95%, 96%, 97%, 98%, or 99% of all molecules in a composition that share the constitution of an agent or a salt thereof are the agent or a salt thereof. In some embodiments, a level is about or at least about 60%. In some embodiments, it is about or at least about 65%. In some embodiments, it is about or at least about 70%. In some embodiments, it is about or at least about 75%. In some embodiments, it is about or at least about 80%. In some embodiments, it is about or at least about 85%. In some embodiments, it is about or at least about 90%. In some embodiments, it is about or at least about 95%. In some embodiments, it is about or at least about 96%. In some embodiments, it is about or at least about 97%. In some embodiments, it is about or at least about 98%. In some embodiments, it is about or at least about 99%.

[0446] In some embodiments, a provided therapeutic composition may comprise one or more additional therapeutic agents and/or one or more stabilizing agents and/or one or more agents that alters (e.g., extends or limits to a particular tissue, location or site) rate or extent of delivery over time.

[0447] In some embodiments, a composition is a pharmaceutical composition which comprises or delivers a provided agent (e.g., a stapled peptide) or a pharmaceutically acceptable salt thereof and a pharmaceutically acceptable excipient. In some embodiments, a composition comprises one and only stereoisomer of an agent (e.g., a stapled peptide) and/or one or more salts thereof. In some embodiments, a composition comprises two or more stereoisomers of an agent (e.g., a stapled peptide) and/or one or more salts thereof. In some embodiments, the two or more stereoisomers of an agent (e.g., a stapled peptide) or salts thereof elute as a single peak (e.g., UV and/or MS detection) in a chromatography, e.g., HPLC.

### Uses and Applications

[0448] Provided agents and compositions can be utilized for various purposes. For example, certain compounds may be utilized as amino acids, either directly or for preparation of other compounds such as peptides. Certain agents, e.g., peptides, may be utilized to prepare stapled peptides. Certain agents that are or comprise peptides, particularly stapled peptides, and compositions thereof, are biologically active and can be utilized for various purposes, e.g., as therapeutics toward various conditions, disorders or diseases, as tools for modulating biological functions, etc.

[0449] In some embodiments, the present disclosure provides agents and compositions thereof for modulating beta-catenin functions. In some instances, beta-catenin is reported to have multiple cellular functions including regulation and coordination of cell-cell adhesion and gene transcription. In some embodiments, agents described herein may inhibit beta-catenin activity and/or level and may, for example, inhibit neoplastic growth. In some embodiments, agents described herein may activate and/or increase level of beta-catenin and may, for example, be used to treat male pattern baldness or alopecia.

[0450] It is reported that beta-catenin can interact with members of the TCF/LEF family at a TCF site on beta-catenin. In some embodiments, provided technologies can decrease, suppress or block one or more of such interactions. In some embodiments, the present disclosure provides methods for modulating an interaction between beta-catenin and its binding partner (e.g., a TCF/LEF family member) comprising contacting beta-catenin with a provided agent.

[0451] In some embodiments, binding of provided agents to beta-catenin competes or inhibits binding of another agent. In some embodiments, binding of provided agents to beta-catenin competes or inhibits binding of another agent. In some embodiments, binding of provided agents to beta-catenin competes or inhibits binding of TCF or a fragment thereof.

[0452] In some embodiments, provided agents compete with TCF7, LEF1, TCF7L1, TCF7L2, Axin1, Axin2, APC, CDH1, or CDH2, or a fragment thereof, for beta-catenin binding.

[0453] In some embodiments, provided agents interfere with interactions of TCF7, LEF1, TCF7L1, TCF7L2, Axin1, Axin2, APC, CDH1, or CDH2, or a fragment thereof, with beta-catenin.

[0454] In some embodiments, provided technologies can reduce or block beta-catenin's interactions with all TCF family members, E-cadherin and APC, but did not significantly affect its interactions with ICAT, AXIN and BCL9. In some embodiments, provided technologies can interrupt beta-catenin/TCF interaction at both physical interaction level (e.g., as confirmed by NanoBRET, co-IP, etc.) and transcriptional level (e.g., as confirmed by reporter cell line, endogenous gene expression, etc.). In some embodiments, provided technologies show no effect on beta-catenin stability.

[0455] In some embodiments, the present disclosure provides methods for modulating interactions of beta-catenin with a partner, e.g., TCF7, LEF1, TCF7L1, TCF7L2, Axin1, Axin2, APC, CDH1, or CDH2, or a fragment thereof, comprising contacting beta-catenin with a provided agent or a composition that comprises or delivers a provided agent. In some embodiments, the present disclosure provides methods for modulating interactions of beta-catenin with a partner, e.g., TCF7, LEF1, TCF7L1, TCF7L2, Axin1, Axin2, APC, CDH1, or CDH2, or a fragment thereof, comprising administering or delivering to a system comprising beta-catenin and the partner a provided agent or a composition that comprises or delivers a provided agent. In some embodiments, a system is an in vitro system. In some embodiments, a system is an in vivo system. In some embodiments, a system is or comprises a cell, tissue or organ. In some embodiments, a system is a subject. In some embodiments, the present disclosure provides method for inhibiting cell growth, comprising administering or delivering to a population of cells an effective amount of a provided agent or a pharmaceutically acceptable salt thereof. In some embodiments, the present disclosure provides method for killing cells associated with a condition, disorder or disease (e.g., cancer), comprising administering or delivering to a population of such cells an effective amount of a provided agent or a pharmaceutically acceptable salt thereof.

[0456] In some embodiments, a system, cell, tissue, organ or subject comprises or expresses a mutant beta-catenin. In some embodiments, a cell is a hepatocellular cell that comprises or expresses a mutant beta-catenin. In some embodiments, a cell is a hepatocellular cancer cell that comprises or expresses a mutant beta-catenin. In some embodiments, a system, tissue, organ or subject comprises a hepatocellular cell that comprises or expresses a mutant beta-catenin. In some embodiments, a system, cell, tissue, organ or subject comprises a hepatocellular cancer cell that comprises or expresses a mutant beta-catenin. For example, in some embodiments, a mutation is D32V. In some embodiments, a mutation is D32H. In some embodiments, a mutation is S45F. In some embodiments, a mutation is S37C. In some embodiments, a mutant beta-catenin is D32V beta-catenin. In some embodiments, a mutant beta-catenin is D32H beta-catenin. In some embodiments, a mutant beta-catenin is S45F beta-catenin. In some embodiments, a mutant beta-catenin is S37C beta-catenin. In some embodiments, a mutation is associated with a condition, disorder or disease, e.g., cancer (e.g., hepatocellular cancer).

[0457] In some embodiments, the present disclosure provides methods for preventing a condition, disorder or disease associated with beta-catenin (e.g., a cancer, a neurodegenerative disease, etc.), comprising administering or delivering to a subject susceptible thereto an effective amount of a provided agent or a pharmaceutically acceptable salt thereof. In some embodiments, the present disclosure provides methods for treating a condition, disorder or disease associated with beta-catenin (e.g., aberrant beta-catenin activity and/or expression level), comprising administering or delivering to a subject suffering therefrom an effective amount of a provided agent or a pharmaceutically acceptable salt thereof. In some embodiments, a provided agent is administered as a pharmaceutical composition that comprises or delivers an effective amount of a provided agent or a pharmaceutically acceptable salt thereof. In some embodiments, a condition, disorder or disease is associated with beta-catenin interaction with a partner, e.g., TCF7, LEF1, TCF7L1, TCF7L2, Axin1, Axin2, APC, CDH1, and/or CDH2. In some embodiments, a condition, disorder or disease is associated with beta-catenin with TCF. In some embodiments, a condition, disorder or disease is cancer. In some embodiments, provided agents may be administered in combination with another therapy, e.g., immunotherapy. In some embodiments, a condition, disorder, or disease is selected from cancer, cardiac disease, dilated cardiomyopathy, fetal alcohol syndrome, depression, and diabetes. In some embodiments, a condition, disorder, or disease is a heart condition, disorder, or disease. In some embodiments, a condition, disorder, or disease is cancer. In some embodiments a cancer is selected from: colon cancer, colorectal cancer, rectal cancer, prostate cancer familial adenomatous polyposis (FAP), Wilms Tumor, melanoma, hepatocellular carcinoma, ovarian cancer, endometrial cancer, medulloblastoma pilomatricomas, primary hetpatocellular carcinoma, ovarial carcinoma, breast cancer, lung cancer, glioblastoma, pliomatrixoma, medulloblastoma, thyroid tumors, and ovarian neoplasms. In some embodiments, a condition, disorder or disease is a cancer, e.g., colorectal cancer, hepatocellular cancer, melanoma, gastric cancer, bladder cancer, and endometrial cancer. In some embodiments, a cancer is colorectal cancer. In some embodiments, a cancer is hepatocellular cancer. In some embodiments, a cancer is prostate cancer. In some embodiments, a cancer is melanoma. In some embodiments, a subject comprises a mutation in beta-catenin, e.g., D32V, D32H, etc. In some embodiments, a subject comprises a mutation in beta-catenin, e.g., S45F, S37C, etc. In some embodiments, a subject comprises or expresses beta-catenin D32V. In some embodiments, a subject comprises or expresses beta-catenin D32H. In some embodiments, a subject comprises or expresses beta-catenin S45F. In some embodiments, a subject comprises or expresses beta-catenin S37C. In some embodiments, a mutant beta-catenin is or is expressed in a hepatocellular cell. In some embodiments, a mutant beta-catenin is or is expressed in a cancer cell. In some embodiments, a mutant beta-catenin is or is expressed in a hepatocellular cancer cell. In some embodiments, mutations in beta-catenin are present in cells, models, tissues, organs, systems, subjects, etc., with other mutations, e.g., those associated with various conditions, disorders or diseases such as cancer. For example, in some embodiments, a beta-catenin mutation is present together with a MSH6 mutation. In some embodiments, a cancer is MSI-H. In some embodiments, a cancer is MSI-H and comprises a beta-catenin mutation optionally with another mutation, e.g., a MSH6 mutation.

[0458] Among other things, provided technologies can provide effective tumor size reduction across a period of time, e.g., in some embodiments, about or at least about 10, 20, 30, 40, 50, 60, 70 days, or about or at least about 1, 2, 3, 4, 5, 6, 7, 8, 9, 10, 11 or 12 months. In some embodiments, provided technologies can reduce tumor growth across a period of time, e.g., in some embodiments, about or at least about 10, 20, 30, 40, 50, 60, 70 days, or about or at least about 1, 2, 3, 4, 5, 6, 7, 8, 9, 10, 11 or 12 months. In some embodiments, provided technologies substantially prevent tumor growth across a period of time, e.g., in some embodiments, about or at least about 10, 20, 30, 40, 50, 60, 70 days, or about or at least about 1, 2, 3, 4, 5, 6, 7, 8, 9, 10, 11 or 12 months. In some embodiments, reduction of tumor size, and/or reduction or prevention of tumor growth, is observed in an animal model, e.g., those described herein. In some embodiments, reduction of tumor size, and/or reduction or prevention of tumor growth, is observed in a subject, e.g., a cancer patient. In some embodiments, reduction of tumor size, and/or reduction or prevention of tumor growth, is observed when one or more doses are administered. In some embodiments, reduction of tumor size, and/or reduction or prevention of tumor growth, is observed and/or maintained after a dose. In some embodiments, reduction of tumor size, and/or reduction or prevention of tumor growth, is observed and/or maintained after a last dose, e.g., about or at least about 10, 20, 30, 40, 50, or 60 days, or about or at least about 1, 2, 3, 4, 5, 6, 7, 8, 9, 10, 11 or 12 months, after a last dose.

[0459] In some embodiments, the present disclosure provides technologies for modulating level of expression and/or activity of a nucleic acid, e.g., a gene, a transcript, a polypeptide, and/or a product thereof in a system, comprising administering or delivering to the system a provided agent or a composition that comprises or delivers a provided agent. In some embodiments, level of expression of a nucleic acid, e.g., a gene, or a product thereof (e.g., a transcript, a polypeptide, etc.) is modulated. In some embodiments, level of activity of a nucleic acid, e.g., a gene, or a product thereof (e.g., a transcript, a polypeptide, etc.) is modulated. In some embodiments, level of a transcript and/or a product thereof (e.g., a polypeptide) is modulated. In some embodiments, level of activity of a transcript and/or a product thereof (e.g., a polypeptide) is modulated. In some embodiments, a transcript is a transcript of a nucleic acid, e.g., gene, described herein. In some embodiments, level of a polypeptide is modulated. In some embodiments, level of activity of a polypeptide is modulated. In some embodiments, a polypeptide is a encoded by a nucleic acid or a transcript described herein. In some embodiments, a level is increased. In some embodiments, a level is decreased. As described herein, in some embodiments, a system is an in vitro system. In some embodiments, a system is an in vivo system. In some embodiments, a system is or comprises a cell, tissue or organ. In some embodiments, a system is or comprises one or more cancer cells. In some embodiments, a system is or comprises tumor. In some embodiments, a system is or comprises an organism. In some embodiments, a system is a subject. In some embodiments, a system is a human. In some embodiments, a system comprises beta-catenin. In some embodiments, a system expresses beta-catenin. In some embodiments, a system comprises beta-catenin and a partner. In some embodiments, a system expresses beta-catenin and a partner. In some embodiments, a level is regulated by beta-catenin. In some embodiments, a level is regulated by WNT activation. In some embodiments, a level is regulated by beta-catenin/WNT signaling. In some embodiments, a level is regulated by interaction of beta-catenin and a partner. In some embodiments, interaction of beta-catenin and a partner is modulated, e.g., reduced, prevented, etc., by an agent, e.g., a stapled peptide, as described herein. For example, in some embodiments, a partner is TCF. In some embodiments, level of expression and/or activity of a nucleic acid and/or a product thereof is modulated. In some embodiments, a nucleic acid is AXIN2. In some embodiments, level of an AXIN2 transcript, e.g., mRNA, is reduced. In some embodiments, level of an AXIN2 polypeptide is reduced. In some embodiments, a nucleic acid is SP5. In some embodiments, level of an SP5 transcript, e.g., mRNA, is reduced. In some embodiments, level of an SP5 polypeptide is reduced. In some embodiments, a nucleic acid is CXCL12. In some embodiments, level of a CXCL12 transcript, e.g., mRNA, is increased. In some embodiments, level of a CXCL12 polypeptide is increased. In some embodiments, a nucleic acid is a member of a negatively enriched gene set observed in, or can be identified using technologies in, e.g., WO 2022/261257. In some embodiments, a nucleic acid is a member of BCAT_GDS748_UP gene set. In some embodiments, a nucleic acid is a member of BCAT.100_UP.V1_UP gene set. In some embodiments, a nucleic acid is a member of HALLMARK_WNT_BETA-CATENIN_SIGNALING gene set. In some embodiments, a nucleic acid is a member of RASHI-RESPONSE_TO_IONIZING-RADIATION_1 gene set. In some embodiments, a nucleic acid is a member of REACTOME-RRNA_PROCESSING gene set. In some embodiments, a nucleic acid is a member of HALLMARK_MYC_TARGETS_V1 gene set. In some embodiments, a nucleic acid is a member of HALLMARK_MYC_TARGETS_V2 gene set. In some embodiments, a nucleic acid is a member of HALLMARK_OXIDATIVE_PHOSPHORYLATION gene set. In some embodiments, a nucleic acid is a member of HALLMARK_E2F_TARGETS gene set. In some embodiments, a nucleic acid is a member of HALLMARK_TNFA_SIGNALING_VIA_NFKB gene set. In some embodiments, a gene set is described in a Figure or an Example. In some embodiments, a nucleic acid is described in a Figure or an Example, or is a member of a gene set is described in a Figure or an Example. Description of various gene sets can be found publicly, e.g., www.gsea-msigdb.org/gsea/msigdb/. In some embodiments, one or more or some or a majority of but not all nucleic acids or genes in a gene set is impacted in the same way, but overall a gene set can be negatively or positively enriched

[0460] In some embodiments, the present disclosure provides technologies for detecting, monitoring and/or confirming efficacy of an agent, e.g., a stapled peptide, or a method, e.g., a method of treating a condition, disorder or disease, a method for modulating level of a transcript and/or a product and/or activity thereof, comprising assessing level of expression and/or activity of a nucleic acid, e.g., a gene, a transcript, a polypeptide, and/or a product thereof. In some embodiments, the present disclosure provides technologies for detecting, monitoring and/or confirming efficacy of an agent, e.g., a stapled peptide, comprising administering the agent to a subject, and assessing level of expression and/or activity of a nucleic acid, e.g., a gene, a transcript, a polypeptide, and/or a product thereof, in the subject. In some embodiments, the present disclosure provides technologies for detecting, monitoring and/or confirming efficacy of a method for treating a condition, disorder or disease in a subject, comprising assessing level of expression and/or activity of a nucleic acid, e.g., a gene, a transcript, a polypeptide, and/or a product thereof, in the subject. In some embodiments, a method is a method for treating a condition, disorder or disease associated with TCF-beta-catenin interaction in a subject. In some embodiments, a condition, disorder or disease is cancer as described herein. In some embodiments, the present disclosure provides technologies for selecting subjects for administration or delivery of an agent, e.g., stapled peptide agents described herein (e.g., for preventing or treating a condition, disorder or disease). In some embodiments, the present disclosure provides technologies for selecting subjects for continued administration or delivery of an agent, e.g., stapled peptide agents described herein (e.g., for preventing or treating a condition, disorder or disease) after one or more administrations or deliveries. In some embodiments, level of a transcript is assessed. In some embodiments, level of a polypeptide is assessed. In some embodiments, assessment is performed utilizing a sample or samples collected from a system or a subject. In some embodiments, a sample is collected during administration or delivery. In some embodiments, a sample is collected after administration or delivery. As described herein, in some embodiments, level of expression and/or activity of a nucleic acid and/or a product thereof is modulated. In some embodiments, a nucleic acid is AXIN2. In some embodiments, level of an AXIN2 transcript, e.g., mRNA, is reduced. In some embodiments, level of an AXIN2 polypeptide is reduced. In some embodiments, a nucleic acid is SP5. In some embodiments, level of an SP5 transcript, e.g., mRNA, is reduced. In some embodiments, level of an SP5 polypeptide is reduced. In some embodiments, a nucleic acid is CXCL12. In some embodiments, level of a CXCL12 transcript, e.g., mRNA, is increased. In some embodiments, level of a CXCL12 polypeptide is increased. In some embodiments, a nucleic acid is a member of a gene set as described herein. In some embodiments, a nucleic acid is a member of BCAT_GDS748_UP gene set. In some embodiments, a nucleic acid is a member of BCAT.100_UP.V1_UP gene set. In some embodiments, a nucleic acid is a member of

[0461] HALLMARK_WNT_BETA-CATENIN_SIGNALING gene set. In some embodiments, a nucleic acid is a member of RASHI-RESPONSE_TO_IONIZING-RADIATION_1 gene set. In some embodiments, a nucleic acid is a member of REACTOME-RRNA_PROCESSING gene set. In some embodiments, a nucleic acid is a member of HALLMARK_MYC_TARGETS_V1 gene set. In some embodiments, a nucleic acid is a member of HALLMARK_MYC_TARGETS_V2 gene set. In some embodiments, a nucleic acid is a member of HALLMARK_OXIDATIVE_PHOSPHORYLATION gene set. In some embodiments, a nucleic acid is a member of HALLMARK_E2F_TARGETS gene set. In some embodiments, a nucleic acid is a member of HALLMARK_TNFA_SIGNALING_VIA_NFKB gene set. In some embodiments, a gene is CCND2. In some embodiments, a gene is WNT5B. In some embodiments, a gene is AXIN2. In some embodiments, a gene is NKD1. In some embodiments, a gene is WNT6. In some embodiments, a gene is DKK1. In some embodiments, a gene is DKK4. In some embodiments, expression of such a nucleic acid, e.g., a gene, is reduced. In some embodiments, level of a product of such a nucleic acid, e.g., a transcript (e.g., mRNA), a polypeptide, etc., is reduced. In some embodiments, level of activity of a product of such a nucleic acid, e.g., a transcript (e.g., mRNA), a polypeptide, etc., is reduced. In some embodiments, a nucleic acid is a member of a positively enriched gene set observed in, or can be identified using technologies in, e.g., Example 17. In some embodiments, if one or more desired reductions of expression and/or levels of transcripts and/or products thereof, and/or one or more desired negatively and/or positively enriched gene sets, are observed, administration or delivery continues. In some embodiments, administration or delivery continues as prior one(s). In some embodiments, administration or delivery continue with an adjusted dose level and/or regimen. In some embodiments, if desired reductions of expression and/or levels of transcripts and/or products thereof, and/or one or more desired negatively and/or positively enriched gene sets, are not observed, administration or delivery may be adjusted, and in some embodiments, discontinued. In some embodiments, as described herein, desired reductions of expression and/or levels of transcripts and/or products thereof comprise reductions of expression and/or levels of transcripts and/or products thereof of one or more or a majority of or all of SP5, CCND2, WNT5B, AXIN2, NKD1, WNT6, DKK1 and DKK4, nucleic acids of BCAT_GDS748_UP, BCAT.100_UP.VI_UP, HALLMARK_WNT_BETA-CATENIN_SIGNALING, RASHI-RESPONSE_TO_IONIZING-RADIATION_1, REACTOME-RRNA_PROCESSING, HALLMARK_MYC_TARGETS_V1, HALLMARK_MYC_TARGETS_V2, HALLMARK_OXIDATIVE_PHOSPHORYLATION, HALLMARK_E2F_TARGETS, and HALLMARK_TNFA_SIGNALING_VIA_NFKB. In some embodiments, as described herein, desired increase of expression and/or levels of transcripts and/or products thereof comprise increase of expression and/or levels of transcripts and/or products thereof of CXCL12. In some embodiments, desired gene set enrichments comprise negative enrichment of one or more or all of BCAT_GDS748_UP, BCAT.100_UP.V1_UP, HALLMARK_WNT_BETA-CATENIN_SIGNALING, RASHI-RESPONSE_TO_IONIZING-RADIATION_1, REACTOME-RRNA_PROCESSING, HALLMARK_MYC_TARGETS_V1, HALLMARK_MYC_TARGETS_V2, HALLMARK_OXIDATIVE_PHOSPHORYLATION, HALLMARK_E2F_TARGETS, and HALLMARK_TNFA_SIGNALING_VIA_NFKB. Those skilled in the art, e.g., those skilled in relevant clinical fields, reading the present disclosure will appreciate how to make decisions in accordance with the present disclosure.

[0462] In some embodiments, comparison is made to a reference. For example, reduction, increase, enrichment (negative or positive), changes, etc., are typically made to a suitable reference. In some embodiments, reduction, increase, enrichment (negative or positive), changes, etc., are to a reference assessment, in some embodiments, of a reference sample. In some embodiments, a reference assessment is or comprises assessment conducted prior to an administration or delivery of an agent. In some embodiments, a reference sample is collected prior to an administration or delivery of an agent. In some embodiments, a reference assessment is or comprises assessment conducted during an administration or delivery of an agent. In some embodiments, a reference sample is collected during an administration or delivery of an agent. In some embodiments, a reference assessment is or comprises assessment conducted after an administration or delivery of an agent. In some embodiments, a reference sample is collected after an administration or delivery of an agent. In some embodiments, a reference assessment is or comprises assessment conducted after an earlier administration or delivery of an agent. In some embodiments, a reference sample is collected after earlier an administration or delivery of an agent.

[0463] In some embodiments, a sample is an aliquot of material obtained or derived from a source of interest as described herein. In some embodiments, a source of interest is a biological or environmental source. In some embodiments, a source of interest may be or comprise a cell or an organism, such as a microbe, a plant, or an animal (e.g., a human). In some embodiments, a source of interest is or comprises biological tissue or fluid. In some embodiments, a biological tissue or fluid may be or comprise amniotic fluid, aqueous humor, ascites, bile, bone marrow, blood, breast milk, cerebrospinal fluid, cerumen, chyle, chime, ejaculate, endolymph, exudate, feces, gastric acid, gastric juice, lymph, mucus, pericardial fluid, perilymph, peritoneal fluid, pleural fluid, pus, rheum, saliva, sebum, semen, serum, smegma, sputum, synovial fluid, sweat, tears, urine, vaginal secreations, vitreous humour, vomit, and/or combinations or component(s) thereof. In some embodiments, a biological fluid may be or comprise an intracellular fluid, an extracellular fluid, an intravascular fluid (blood plasma), an interstitial fluid, a lymphatic fluid, and/or a transcellular fluid. In some embodiments, a biological fluid may be or comprise a plant exudate. In some embodiments, a biological tissue or sample may be obtained, for example, by aspirate, biopsy (e.g., fine needle or tissue biopsy), swab (e.g., oral, nasal, skin, or vaginal swab), scraping, surgery, washing or lavage (e.g., brocheoalvealar, ductal, nasal, ocular, oral, uterine, vaginal, or other washing or lavage). In some embodiments, a biological sample is or comprises cells obtained from an individual. In some embodiments, a sample is a “primary sample” obtained directly from a source of interest by any appropriate means. In some embodiments, as will be clear from context, the term “sample” refers to a preparation that is obtained by processing (e.g., by removing one or more components of and/or by adding one or more agents to) a primary sample. For example, filtering using a semi-permeable membrane. Such a “processed sample” may comprise, for example nucleic acids or proteins extracted from a sample or obtained by subjecting a primary sample to one or more techniques such as amplification or reverse transcription of nucleic acid, isolation and/or purification of certain components, etc. In some embodiments, a sample comprise cancer cells. In some embodiments, a sample is obtained from a tumor. In some embodiments, a sample is obtained from a tumor in a patient.

[0464] In some embodiments, levels of two or more transcripts and/or products thereof may be assessed. In some embodiments, assessment is performed after one or more doses of agents, e.g., stapled peptides are administered or delivered to a subject. In some embodiments, if profiles, e.g., reduction, increase, etc., of one or more transcripts and/or products thereof matches those described herein, administration or delivery to a subject may continue. In some embodiments, if profiles, e.g., reduction, increase, etc., of one or more transcripts and/or products thereof matches those described herein, administration or delivery to a subject may be stopped and/or continued according to different dose levels and/or regimens.

[0465] Various technologies can be utilized in accordance with the present disclosure to formulate, distribute, administer or deliver provided technologies such as agents, peptides, compounds, compositions, etc. For example, in some embodiments, administration may be ocular, oral, parenteral, topical, etc. In some particular embodiments, administration may be bronchial (e.g., by bronchial instillation), buccal, dermal (which may be or comprise, for example, one or more of topical to the dermis, intradermal, interdermal, transdermal, etc), enteral, intra-arterial, intradermal, intragastric, intramedullary, intramuscular, intranasal, intraperitoneal, intrathecal, intravenous, intraventricular, within a specific organ (e. g., intrahepatic), mucosal, nasal, oral, rectal, subcutaneous, sublingual, topical, tracheal (e.g., by intratracheal instillation), vaginal, vitreal, etc. In some embodiments, administration may involve dosing that is intermittent (e.g., a plurality of doses separated in time) and/or periodic (e.g., individual doses separated by a common period of time) dosing. In some embodiments, administration may involve continuous dosing (e.g., perfusion) for at least a selected period of time. In some embodiments, provided technologies are administered intravenously.

[0466] Among other things, the present disclosure provides various structural moieties including designed amino acid residues that can be utilized to optimize various properties and activities, stability, delivery, pharmacodynamics, pharmacokinetics, etc. to provide various dosage forms, dosage regimen, therapeutic windows, etc. In some embodiments, provided agents and compositions thereof may be utilized with improved dosage regimen and/or unit doses. In some embodiments, administration of provided agents are adjusted based on conditions, disorders or diseases and/or subpopulations. In some embodiments, administration and/or dosage regimen of provided technologies are adjusted according to certain biomarkers and genomic alterations.

[0467] Provided agents may deliver biological effects, e.g., therapeutic effects, via various mechanisms. In some embodiments, efficacy may be driven by AUC. In some embodiments, efficacy may be driven by Cmax.

[0468] In some embodiments, a provided agent is utilized in combination with another therapy. In some embodiments, a provided agent is utilized in combination with another therapeutic agent. In some embodiments, another therapy or therapeutic agent is administered prior to an administration or delivery of a provided agent. In some embodiments, another therapy or therapeutic agent is administered at about the same time as an administration or delivery of a provided agent. In some embodiments, a provided agent and another agent is in the same pharmaceutical composition. In some embodiments, another therapy or therapeutic agent is administered subsequently to an administration or delivery of a provided agent. In some embodiments, a subject is exposed to both a provided agent and another therapeutic agent. In some embodiments, both a provided agent and another agent can be detected in a subject. In some embodiments, a provided agent is administered before another agent is cleared out by a subject or vice versa. In some embodiments, a provided agent is administered within the half-life, or 2, 3, 4, 5 or 6 times of the half-life, of another agent or vice versa. In some embodiments, a subject is exposed to a therapeutic effect of a provided agent and a therapeutic effect of another therapeutic agent. In some embodiments, an agent may provide an effect after an agent is cleared out or metabolized by a subject. In some embodiments, a procedure, e.g., surgery, radiation, etc., may provide an effect after the procedure is completed.

[0469] In some embodiments, another therapy is a cancer therapy. In some embodiments, another therapy is or comprises surgery. In some embodiments, another therapy is or comprises radiation therapy. In some embodiments, another therapy is or comprises immunotherapy. In some embodiments, another therapeutic agent is or comprises a drug. In some embodiments, another therapeutic agent is or comprises a cancer drug. In some embodiments, another therapeutic agent is or comprises a chemotherapeutic agent. In some embodiments, another therapeutic agent is or comprises a hormone therapy agent. In some embodiments, another therapeutic agent is or comprises a kinase inhibitor. In some embodiments, another therapeutic agent is or comprises a checkpoint inhibitor (e.g., antibodies against PD-1, PD-L1, CTLA-4, etc.). In some embodiments, a provide agent can be administered with lower unit dose and/or total dose compared to being used alone. In some embodiments, another agent can be administered with lower unit dose and/or total dose compared to being used alone. In some embodiments, one or more side effects associated with administration of a provided agent and/or another therapy or therapeutic agent are reduced. In some embodiments, a combination therapy provides improved results, e.g., when compared to each agent utilized individually. In some embodiments, a combination therapy achieves one or more better results, e.g., when compared to each agent utilized individually.

[0470] In some embodiments, another agent is a checkpoint inhibitor, an EGFR inhibitor, a VEGF inhibitor, a VEGFR inhibitor, a kinase inhibitor, or an anti-cancer drug.

[0471] In some embodiments, an additional agent is a checkpoint inhibitor. In some embodiments, an additional agent is an immune oncology agent. In some embodiments, an additional agent is an antibody against a checkpoint molecules. In some embodiments, an additional agent is an antibody of PD1, PDL-1, CTLA4, A2AR, B7-H3, B7-H4, BTLA, IDO, KIR, LAG3, TIM-s, C₁₀orf54, etc. In some embodiments, an antibody is an anti-PD1 antibody. In some embodiments, an antibody is an anti-PD-L1 antibody. In some embodiments, an antibody is an anti-CTLA4.

[0472] In some embodiments, another agent is an EGFR inhibitor, e.g., erlotinib, gefitinib, lapatinib, panitumumab, vandetanib, cctuximab, etc. In some embodiments, another agent is an VEGF and/or VEGFR inhibitor, e.g., pazopanib, bevacizumab, sorafenib, sunitinib, axitinib, ponatinib, regorafenib, vandetanib, cabozantinib, ramucirumab, lenvatinib, ziv-aflibercept, etc. In some embodiments, another agent is a kinase inhibitor. In some embodiments, another therapeutic agent is a chemotherapeutic agent. In some embodiments, another therapeutic agent is an anti-cancer drug, e.g., cyclophosphamide, methotrexate, 5-fluorouracil (5-FU), doxorubicin, mustine, vincristine, procarbazine, prednisolone, dacarbazine, bleomycin, etoposide, cisplatin, epirubicin, capecitabine, folinic acid, actinomycin, all-trans retinoic acid, azacitidine, azathioprine, bortezomib, carboplatin, chlorambucil, cytarabine, daunorubicin, docetaxel, doxifluridine, fluorouracil, gemcitabine, hydroxyurea, idarubicin, imatinib, irinotecan, mechlorethamine, mercaptopurine, mitoxantrone, paclitaxel, pemetrexed, teniposide, tioguanine, topotecan, valrubicin, vinblastine, vindesine, vinorelbine, oxaliplatin, etc.

[0473] Among other things, the present disclosure provides the following Embodiments:

[0474] 1. An agent having the structure of formula I:

or a salt thereof, wherein:
[0475] R^{N} is a peptide, an amino protecting group or R′-L^{RN}-;
[0476] each of L^{P1}, L^{P2}, L^{P3}, L^{P4}, L^{P5}, L^{P6}, and L^{P7} is independently L, wherein L^{P1}, L^{P2}, L^{P3}, L^{P4}, L^{P5}, L^{P6}, and L^{P7} comprise:
   [0477] a first R′ group and a second R′ group which are taken together to form -L^{s}- which is bonded to the atom to which a first R′ group is attached and the atom to which a second R′ group is attached; and
   [0478] a third R′ group and a fourth R′ group which are taken together to form -L^{s}- which is bonded to the atom to which a third R′ group is attached and the atom to which a fourth R′ group is attached;
[0479] each L^{s} is independently -L^{s1}-L^{s2}-L^{s3}-, wherein each L^{s1}, L^{s2} and L^{s3} is independently L;
[0480] L^{AA1} is an amino acid residue that comprises a side chain comprising an acidic or polar group;
[0481] L^{AA2} is an amino acid residue that comprises a side chain comprising an acidic or polar group;
[0482] L^{AA3} is an amino acid residue;
[0483] L^{AA4} is an amino acid residue that comprises a side chain comprising an optionally substituted aromatic group;
[0484] L^{AA5} is an amino acid residue that comprises a side chain comprising an optionally substituted aromatic group;
[0485] L^{AA6} is an amino acid residue that comprises a side chain comprising an optionally substituted aromatic group;
[0486] R^{C} is a peptide, a carboxyl protecting group, -L^{RC}-R′, —O-L^{RC}-R′ or —N(R′)-L^{RC}-R′;
[0487] each of L^{RN} and L^{RC} is independently L;
[0488] each L is independently a covalent bond, or an optionally substituted, bivalent C₁-C₂₅ aliphatic or heteroaliphatic group having 1-10 heteroatoms, wherein one or more methylene units of the group are optionally and independently replaced with —C(R′)₂—, -Cy-, —O—, —S—, —S—S—, —N(R′)—, —C(O)—, —C(S)—, —C(NR′)—, —C(O)N(R′)—, —N(R′)C(O)N(R′)—, —N(R′)C(O)O—, —S(O)—, —S(O)₂—, —S(O)₂N(R′)—, —C(O)S—, or —C(O)O—;
[0489] each -Cy- is independently an optionally substituted bivalent, 3-30 membered, monocyclic, bicyclic or polycyclic ring having 0-10 heteroatoms;
[0490] each R′ is independently -L-R, —C(O)R, —CO₂R, or —SO₂R;
[0491] each R is independently —H, or an optionally substituted group selected from C₁₋₃₀ aliphatic, C₁₋₃₀ heteroaliphatic having 1-10 heteroatoms, C_{6 30} aryl, C_{6 30} arylaliphatic, C_{6 30} arylheteroaliphatic having 1-10 heteroatoms, 5-30 membered heteroaryl having 1-10 heteroatoms, and 3-30 membered heterocyclyl having 1-10 heteroatoms, or
[0492] two R groups are optionally and independently taken together to form a covalent bond, or:
[0493] two or more R groups on the same atom are optionally and independently taken together with the atom to form an optionally substituted, 3-30 membered, monocyclic, bicyclic or polycyclic ring having, in addition to the atom, 0-10 heteroatoms; or
[0494] two or more R groups on two or more atoms are optionally and independently taken together with their intervening atom(s) to form an optionally substituted, 3-30 membered, monocyclic, bicyclic or polycyclic ring having, in addition to the intervening atom(s), 0-10 heteroatoms.

[0495] 2. An agent having the structure of formula I:

or a salt thereof, wherein:
[0496] R^{N} is a peptide, an amino protecting group or R′-L^{RN}-;
[0497] each of L^{P1}, L^{P2}, L^{P3}, L^{P4}, L^{P5}, L^{P6}, and L^{P7} is independently L, wherein L^{P1}, L^{P2}, L^{P3}, L^{P4}, L^{P5}, L^{P6}, and L^{P7} comprise:
   [0498] a first R′ group and a second R′ group which are taken together to form -L^{s}- which is bonded to the atom to which a first R′ group is attached and the atom to which a second R′ group is attached; and
   [0499] a third R′ group and a fourth R′ group which are taken together to form -L^{s}- which is bonded to the atom to which a third R′ group is attached and the atom to which a fourth R′ group is attached;
[0500] each L^{s} is independently -L^{s1}-L^{s2}-L^{s3}-, wherein each L^{s1}, L^{s2} and L^{s3} is independently L;
[0501] L^{AA1} is L^{AR}, wherein a methylene unit is replaced with —C(R′)(R^{AS})—, wherein R^{AS} is -L^{AS1}-R^{AA1}, wherein R^{AA1} is —CO₂R or —SO₂R;
[0502] L^{AA2} is L^{AR}, wherein a methylene unit is replaced with —C(R′)(R^{AS})—, wherein R^{AS} is -L^{AS2}-R^{AA2}, wherein R^{AA2} is —CO₂R, or —SO₂R;
[0503] L^{AA3} is L^{AR}, wherein a methylene unit is replaced with —C(R′)(R^{AS})—, wherein R^{AS} is -L^{AS3}-R^{AA3}, wherein R^{AA3} is R′;
[0504] L^{AA4} is L^{AR}, wherein a methylene unit is replaced with —C(R′)(R^{AS})—, wherein R^{AS} is -L^{AS4}-R^{AA4}, wherein R^{AA4} is an optionally substituted group selected from 6-14 membered aryl or 5-14 membered heteroaryl having 1-6 heteroatoms;
[0505] L^{AA5} is L^{AR}, wherein a methylene unit is replaced with —C(R′)(R^{AS})—, wherein R^{AS} is -L^{AS5}-R^{AA5}, wherein R^{AA5} is an optionally substituted group selected from 6-14 membered aryl or 5-14 membered heteroaryl having 1-6 heteroatoms;
[0506] L^{AA6} is L^{AR}, wherein a methylene unit is replaced with —C(R′)(R^{AS})—, wherein R^{AS} is -L^{AS6}-R^{AA6}, wherein R^{AA6} is an optionally substituted group selected from 6-14 membered aryl or 5-14 membered heteroaryl having 1-6 heteroatoms;
[0507] R^{C} is a peptide, a carboxyl protecting group, -L^{RC}-R′, —O-L^{RC}-R′ or —N(R′)-L^{RC}-R′;
[0508] each of L^{RN} and L^{RC} is independently L;
[0509] each L^{AR} is independently an optionally substituted, bivalent C₁-C₆ aliphatic group, wherein one or more methylene units of the group are optionally and independently replaced with —C(R′)₂—, —C(R′)(R^{AS})—, -Cy-, —O—, —S—, —S—S—, —N(R′)—, —C(O)—, —C(S)—, —C(NR′)—, —C(O)N(R′)—, —N(R′)C(O)N(R′)—, —N(R′)C(O)O—, —S(O)—, —S(O)₂—, —S(O)₂N(R′)—, —C(O)S—, or —C(O)O—;
[0510] each of L^{AS1}, L^{AS2}, L^{AS3}, L^{AS4}, L^{AS5}, and L^{AS6} is independently L^{AS};
[0511] each R^{AS} is independently -L^{AS}-R′;
[0512] each L^{AS} is independently a covalent bond or an optionally substituted, bivalent C₁-C₁₀ aliphatic or heteroaliphatic group having 1-5 heteroatoms, wherein one or more methylene units of the group are optionally and independently replaced with —C(R′)₂—, -Cy-, —O—, —S—, —S—S—, —N(R′)—, —C(O)—, —C(S)—, —C(NR′)—, —C(O)N(R′)—, —N(R′)C(O)N(R′)—, —N(R′)C(O)O—, —S(O)—, —S(O)₂—, —S(O)₂N(R′)—, —C(O)S—, or —C(O)O—;
[0513] each L is independently a covalent bond, or an optionally substituted, bivalent C₁-C₂₅ aliphatic or heteroaliphatic group having 1-10 heteroatoms, wherein one or more methylene units of the group are optionally and independently replaced with —C(R′)₂—, -Cy-, —O—, —S—, —S—S—, —N(R′)—, —C(O)—, —C(S)—, —C(NR′)—, —C(O)N(R′)—, —N(R′)C(O)N(R′)—, —N(R′)C(O)O—, —S(O)—, —S(O)₂—, —S(O)₂N(R′)—, —C(O)S—, or —C(O)O—;
[0514] each -Cy- is independently an optionally substituted bivalent, 3-30 membered, monocyclic, bicyclic or polycyclic ring having 0-10 heteroatoms;
[0515] each R′ is independently -L-R, —C(O)R, —CO₂R, or —SO₂R;
[0516] each R is independently —H, or an optionally substituted group selected from C₁₋₃₀ aliphatic, C₁₋₃₀ heteroaliphatic having 1-10 heteroatoms, C₆₋₃₀ aryl, C₆₋₃₀ arylaliphatic, C₆₋₃₀ arylheteroaliphatic having 1-10 heteroatoms, 5-30 membered heteroaryl having 1-10 heteroatoms, and 3-30 membered heterocyclyl having 1-10 heteroatoms, or
[0517] two R groups are optionally and independently taken together to form a covalent bond, or:
[0518] two or more R groups on the same atom are optionally and independently taken together with the atom to form an optionally substituted, 3-30 membered, monocyclic, bicyclic or polycyclic ring having, in addition to the atom, 0-10 heteroatoms; or
[0519] two or more R groups on two or more atoms are optionally and independently taken together with their intervening atom(s) to form an optionally substituted, 3-30 membered, monocyclic, bicyclic or polycyclic ring having, in addition to the intervening atom(s), 0-10 heteroatoms.

[0520] 3. The agent of any one of the preceding Embodiments, wherein L^{P1} is or comprises -[X]ₚ-X¹-, wherein each X and X¹ is independently an amino acid residue, wherein p is 0-10, and X¹ is bonded to L^{AA1}.

[0521] 4. The agent of any one of the preceding Embodiments, wherein L^{AA1} is an amino acid residue that comprises a side chain comprising an acidic group.

[0522] 5. The agent of any one of the preceding Embodiments, wherein L^{P2} is or comprises -[X]pX³X⁴[X]p′-, wherein each X, X³ and X⁴ is independently an amino acid residue, and each of p and p′ is independently 0-10.

[0523] 6. The agent of any one of the preceding Embodiments, wherein L^{AA2} is an amino acid residue that comprises a side chain comprising an acidic group.

[0524] 7. The agent of any one of the preceding Embodiments, wherein L^{AA2} is X⁵.

[0525] 8. The agent of any one of the preceding Embodiments, wherein L^{P3} is or comprises -[X]pX⁶X⁷[X]p′-, wherein each X, X⁶ and X⁷ is independently an amino acid residue, and each of p and p′ is independently 0-10.

[0526] 9. The agent of any one of the preceding Embodiments, wherein L^{AA3} is an amino acid residue that comprises a side chain comprising an acidic group.

[0527] 10. The agent of any one of the preceding Embodiments, wherein L^{P4} is or comprises -[X]pX⁷X⁸[X]p′-, wherein each X, X⁷ and X⁸ is independently an amino acid residue, and each of p and p′ is independently 0-10.

[0528] 11. The agent of any one of the preceding Embodiments, wherein R^{AA4} is an optionally substituted group selected from phenyl, 5- or 6-membered monocyclic heteroaryl having 1-4 heteroatoms, and 9- or 10-membered bicyclic heteroaryl having 1-4 heteroatoms.

[0529] 12. The agent of any one of the preceding Embodiments, wherein L^{P5} is or comprises [X]pX¹⁰X¹¹[X]p′-, wherein each X, X¹⁰ and X¹¹ is independently an amino acid residue, and each of p and p′ is independently 0-10.

[0530] 13. The agent of any one of the preceding Embodiments, wherein R^{AA5} is an optionally substituted group selected from phenyl, 5- or 6-membered monocyclic heteroaryl having 1-4 heteroatoms, and 9- or 10-membered bicyclic heteroaryl having 1-4 heteroatoms.

[0531] 14. The agent of any one of the preceding Embodiments, wherein the length of L^{P6} is a covalent bond.

[0532] 15. The agent of any one of the preceding Embodiments, wherein R^{AA6} is an optionally substituted group selected from phenyl, 5- or 6-membered monocyclic heteroaryl having 1-4 heteroatoms, and 9- or 10-membered bicyclic heteroaryl having 1-4 heteroatoms.

[0533] 16. The agent of any one of the preceding Embodiments, wherein L^{P7} is or comprises —X¹⁴—[X]p′-, wherein p′ is 0-10, each of X and X¹⁴ is independently an amino acid residue, and X¹⁴ is bonded to L^{AA6}.

[0534] 17. The agent of any one of the preceding Embodiments, wherein R^{N} is R′, wherein R′ is —C(O)R, —CO₂R, or —SO₂R.

[0535] 18. The agent of any one of the preceding Embodiments, wherein R^{C} is —OR′ or —N(R′)₂, wherein each R′ is independently R.

[0536] 19. An agent comprising one or more of:
[0537] a first acidic group (e.g., of a first acidic amino acid residue);
[0538] a second acidic group (e.g., of a second acidic amino acid residue);
[0539] a first aromatic group (e.g., of a first aromatic amino acid residue);
[0540] a second aromatic group (e.g., of a first aromatic amino acid residue); and
[0541] a third aromatic group (e.g., of a third aromatic amino acid residue).

[0542] 20. An agent comprising:
[0543] a first acidic group (e.g., of a first acidic amino acid residue);
[0544] a second acidic group (e.g., of a second acidic amino acid residue);
[0545] a first aromatic group (e.g., of a first aromatic amino acid residue);
[0546] a second aromatic group (e.g., of a first aromatic amino acid residue); and
[0547] a third aromatic group (e.g., of a third aromatic amino acid residue).

[0548] 21. An agent comprising:
[0549] a first acidic group (e.g., of a first acidic amino acid residue);
[0550] a second acidic group (e.g., of a second acidic amino acid residue);
[0551] a third acidic group (e.g., of a third acidic amino acid residue);
[0552] a first aromatic group (e.g., of a first aromatic amino acid residue);
[0553] a second aromatic group (e.g., of a first aromatic amino acid residue); and
[0554] a third aromatic group (e.g., of a third aromatic amino acid residue).

[0555] 22. An agent comprising:
[0556] a first acidic group (e.g., of a first acidic amino acid residue);
[0557] a second acidic group (e.g., of a second acidic amino acid residue);
[0558] a hydrophobic group (e.g., of a hydrophobic amino acid residue)
[0559] a first aromatic group (e.g., of a first aromatic amino acid residue);
[0560] a second aromatic group (e.g., of a first aromatic amino acid residue); and
[0561] a third aromatic group (e.g., of a third aromatic amino acid residue).

[0562] 23. An agent comprising:
[0563] a first acidic group (e.g., of a first acidic amino acid residue);
[0564] a second acidic group (e.g., of a second acidic amino acid residue);
[0565] a third acidic group (e.g., of a third acidic amino acid residue);
[0566] a hydrophobic group (e.g., of a hydrophobic amino acid residue)
[0567] a first aromatic group (e.g., of a first aromatic amino acid residue);
[0568] a second aromatic group (e.g., of a first aromatic amino acid residue); and
[0569] a third aromatic group (e.g., of a third aromatic amino acid residue).

[0570] 24. The agent of any one of the preceding Embodiments, wherein the distance between a first acidic group and a second acidic group is about the distance between the acidic groups of two acidic amino acid residues of a peptide motif, wherein there are two amino acid residues between the two acidic amino acid residues.

[0571] 25. The agent of any one of the preceding Embodiments, wherein a first acidic amino acid residue is at position N and a second is at position N+3.

[0572] 26. The agent of any one of the preceding Embodiments, wherein the distance between a first acidic group and a third acidic group is about the distance between the acidic groups of two acidic amino acid residues of a peptide motif, wherein there are three amino acid residues between the two acidic amino acid residues.

[0573] 27. The agent of any one of the preceding Embodiments, wherein a first acidic amino acid residue is at position N and a third is at position N+4.

[0574] 28. The agent of any one of the preceding Embodiments, wherein the distance between a first acidic group and a hydrophobic group is about the distance between the acidic group of an acidic amino acid residue and the hydrophobic group of a hydrophobic amino acid residue of a peptide motif, wherein there are five amino acid residues between the first acidic amino acid residue and the hydrophobic amino acid residue. 29. The agent of any one of the preceding Embodiments, wherein a first acidic amino acid residue is at position N and a hydrophobic amino acid residue is at position N+6.

[0575] 30. The agent of any one of the preceding Embodiments, wherein the distance between a first acidic group and a first aromatic group is about the distance between the acidic group of a first acidic amino acid residue and the aromatic group of an aromatic amino acid residue of a peptide motif, wherein there are six amino acid residues between the first acidic amino acid residue and the first aromatic amino acid residue. 31. The agent of any one of the preceding Embodiments, wherein a first acidic amino acid residue is at position N and a first aromatic amino acid residue is at position N+7.

[0576] 32. The agent of any one of the preceding Embodiments, wherein the distance between the first aromatic group and the second aromatic group is about the distance between the aromatic groups of two aromatic amino acid residues of a peptide motif, wherein there are two amino acid residues between the two aromatic amino acid residues.

[0577] 33. The agent of any one of the preceding Embodiments, wherein a first aromatic amino acid residue is at position M and a second is at position M+3.

[0578] 34. The agent of any one of the preceding Embodiments, wherein the distance between the first aromatic group and the third aromatic group is about the distance between the aromatic groups of two aromatic amino acid residues of a peptide motif, wherein there are three amino acid residues between the two aromatic amino acid residues.

[0579] 35. The agent of any one of the preceding Embodiments,, wherein a first aromatic amino acid residue is at position N and a third is at position M+4).

[0580] 36. The agent of any one of the preceding Embodiments, wherein N is 1, 2, 3, 4, or 5.

[0581] 37. The agent of any one of the preceding Embodiments, wherein M is N+7.

[0582] 38. The agent of any one of the preceding Embodiments, wherein M is 8-16.

[0583] 39. The agent of any one of Embodiments 24-38, wherein the peptide motif is an alpha-helical motif wherein each amino acid residue is independently an alpha amino acid residue.

[0584] 40. The agent of Embodiment 39, wherein the peptide motif is stapled.

[0585] 41. The agent of Embodiment 40, wherein there are two staples in the peptide motif.

[0586] 42. The agent of Embodiment 40, wherein there are three staples in the peptide motif.

[0587] 43. The agent of any one of the preceding Embodiments, wherein the agent is or comprise a peptide.

[0588] 44. The agent of any one of the preceding Embodiments, wherein the peptide is a stapled peptides comprising two or more staples.

[0589] 45. The agent of any one of the preceding Embodiments, wherein the peptide is a stapled peptides comprising three or more staples.

[0590] 46. The agent of any one of the preceding Embodiments, wherein the peptide is a stapled peptides comprising three and no more than three staples.

[0591] 47. The agent of any one of the preceding Embodiments, wherein a first acidic group, a second acidic group, a third acidic group, a hydrophobic group, a first aromatic group, a second aromatic group and a third aromatic group, if present, are presented from N to C direction of a peptide.

[0592] 48. The agent of any one of the preceding Embodiments, wherein the agent is or comprises a helix structure.

[0593] 49. An agent, comprising:

wherein:
[0594] each of X¹, X², X³, X⁴, X⁵, X⁶, X⁷, X⁸, X⁹, X¹⁰, X¹¹, X¹², X¹³, and X¹⁴ is independently an amino acid residue, wherein:
[0595] X² comprises a side chain comprising an acidic or a polar group;
[0596] X⁵ comprises a side chain comprising an acidic or a polar group; and
[0597] each of X⁹, X¹² and X¹³ comprises a side chain comprising an optionally substituted aromatic group.

[0598] 50. An agent, wherein the agent is or comprises a peptide comprising:

[0599] wherein:
[0600] each of p0, p15, p16 and p17 is independently 0 or 1;
[0601] each of X⁰, X¹, X², X³, X⁴, X⁵, X⁶, X⁷, X⁸, X⁹, X¹⁰, X¹¹, X¹², X¹³, X¹⁴, X¹⁵, X¹⁶, and X¹⁷ is independently an amino acid residue, wherein:
[0602] X² comprises a side chain comprising an acidic or a polar group;
[0603] X⁵ comprises a side chain comprising an acidic or a polar group;
[0604] X¹³ comprises a side chain comprising an optionally substituted aromatic group; and
[0605] two or more of X¹, X³, X⁴, X⁷, X¹⁰, X¹¹ and X¹⁴ are each independently an amino acid residue suitable for stapling, or are each independently stapled.

[0606] 51. The agent of any one of the preceding Embodiments, the agent comprises three or more staples within 10-20 amino acid residues.

[0607] 52. The agent of any one of the preceding Embodiments, wherein three or more of X⁰, X¹, X³, X⁴, X⁷, X¹⁰, X¹¹ and X¹⁴ are each independently an amino acid residue suitable for stapling, or are each independently stapled.

[0608] 53. The agent of any one of the preceding Embodiments, wherein X¹ and X⁴ are each independently an amino acid residue suitable for stapling or are

[0609] 54. The agent of any one of Embodiments 1-52, wherein X¹ and X⁴ are connected by a staple.

[0610] 55. The agent of any one of the preceding Embodiments, wherein X⁴ and X¹¹ are each independently an amino acid residue suitable for stapling.

[0611] 56. The agent of any one of Embodiments 1-54, wherein X⁴ and X¹¹ are connected by a staple.

[0612] 57. The agent of any one of the preceding Embodiments, wherein X¹⁰ and X¹⁴ are each independently an amino acid residue suitable for stapling.

[0613] 58. The agent of any one of Embodiments 1-56, wherein X¹⁰ and X¹⁴ are connected by a staple.

[0614] 59. The agent of any one of the preceding Embodiments, wherein X⁷ and X¹⁰ are each independently an amino acid residue suitable for stapling.

[0615] 60. The agent of any one of the preceding Embodiments, wherein the agent comprises a N-terminal group.

[0616] 61. The agent of any one of the preceding Embodiments, wherein the N-terminal group is an acyl group.

[0617] 62. The agent of Embodiment 60, wherein the N-terminal group is Ac.

[0618] 63. The agent of any one of Embodiments 1-62, wherein X¹ is a residue of an amino acid that comprises —CH═CH₂.

[0619] 64. The agent of any one of the preceding Embodiments, wherein X¹ is a residue of an amino acid that comprises —CH═CH₂ and forms a staple with another amino acid residue through olefin metathesis.

[0620] 65. The agent of any one of Embodiments 1-62, wherein X¹ is PL3.

[0621] 66. The agent of any one of the preceding Embodiments, wherein X⁴ is a residue of an amino acid that comprises an olefin.

[0622] 67. The agent of any one of the preceding Embodiments, wherein X⁴ is a residue of an amino acid that comprises two —CH═CH₂.

[0623] 68. The agent of any one of any one of the preceding Embodiments, wherein X⁴ is a residue of an amino acid that comprises two —CH═CH₂ and each forms a staple with another amino acid residue through olefin metathesis.

[0624] 69. The agent of any one of the preceding Embodiments, wherein X⁴ is B5.

[0625] 70. The agent of any one of the preceding Embodiments, wherein X¹⁰ is a residue of an amino acid that comprises an optionally substituted carboxyl group, an optionally substituted amino group, an azidyl group, an optionally substituted alkynyl group, or an optionally substituted thiol group.

[0626] 71. The agent of any one of the preceding Embodiments, wherein X¹⁰ is Lys, GlnR, TriAzLys, sAla, dLys, AsnR, hGlnR, iPrLys, TriAzOrn, DGInR, Orn, 4PipA, sCH2S, [8FBB]Cys, [4FB]Cys, [mXyl]Cys, [oXyl]Cys, [pXyl]Cys, dOrn, dDab, NMeOrn, [2_6-naph]Cys, or [3_3-biph]Cys.

[0627] 72. The agent of any one of the preceding Embodiments, wherein X¹⁰ is Lys.

[0628] 73. The agent of any one of the preceding Embodiments, wherein X¹¹ is a residue of an amino acid that comprises —CH═CH₂.

[0629] 74. The agent of any one of the preceding Embodiments, wherein X¹¹ is a residue of an amino acid that comprises —CH═CH₂ and forms a staple with another amino acid residue through olefin metathesis.

[0630] 75. The agent of any one of the preceding Embodiments, wherein X¹¹ is PyrS2.

[0631] 76. The agent of any one of the preceding Embodiments, wherein X¹⁴ is a residue of an amino acid that comprises a carboxyl group, an amino group, an azidyl group, an alkynyl group, or a thiol group.

[0632] 77. The agent of any one of the preceding Embodiments, wherein X¹⁴ is GlnR, Lys, sAla, Gln, Cys, TriAzLys, AsnR, hGlnR, 4PipA, sAbu, Orn, GlnR, [4mampiperidine]GlnR, [39N2spiroundecane]GlnR, [29N2spiroundecane]GlnR, iPrLys, sCH2S, [diaminobutane]GlnR, [4aminopiperidine]GlnR, dGInR.

[0633] 78. The agent of any one of the preceding Embodiments, wherein X¹⁴ is Glu.

[0634] 79. The agent of any one of the preceding Embodiments, wherein X¹⁰ and X¹⁴ are connected by a staple, wherein the staple comprises —C(O)N(R′)—.

[0635] 80. The agent of any one of the preceding Embodiments, wherein X² comprises a side chain comprising an acidic group.

[0636] 81. The agent of any one of the preceding Embodiments, wherein X² comprises a side chain comprising —COOH or a salt form thereof.

[0637] 82. The agent of any one of the preceding Embodiments, wherein X² is Asp.

[0638] 83. The agent of any one of the preceding Embodiments, wherein X³ comprises one or two hydrophobic side chains.

[0639] 84. The agent of any one of the preceding Embodiments, wherein the side chain of X³ is C₁₋₁₀ alkyl 85. The agent of any one of Embodiments 1-84, wherein X³ is Npg.

[0640] 86. The agent of any one of Embodiments 1-84, wherein X³ is Ile.

[0641] 87. The agent of any one of Embodiments 1-84, wherein X³ is Cha.

[0642] 88. The agent of any one of Embodiments 1-84, wherein X³ is DipA.

[0643] 89. The agent of any one of Embodiments 1-84, wherein X³ is Chg.

[0644] 90. The agent of any one of Embodiments 1-84, wherein X³ is Leu.

[0645] 91. The agent of any one of Embodiments 1-84, wherein X³ is Ala.

[0646] 92. The agent of any one of the preceding Embodiments, wherein X⁵ comprises a side chain comprising an acidic group.

[0647] 93. The agent of any one of the preceding Embodiments, wherein X⁵ comprises a side chain comprising —COOH or a salt form thereof.

[0648] 94. The agent of any one of the preceding Embodiments, wherein X⁵ is Asp.

[0649] 95. The agent of any one of Embodiments 1-93, wherein X⁵ is 3COOHF.

[0650] 96. The agent of any one of Embodiments 1-93, wherein X⁵ is Glu.

[0651] 97. The agent of any one of the preceding Embodiments, wherein X⁶ comprises a side chain comprising an acidic group.

[0652] 98. The agent of any one of the preceding Embodiments, wherein X⁶ comprises a side chain comprising —COOH or a salt form thereof.

[0653] 99. The agent of any one of the preceding Embodiments, wherein X⁶ is 3COOHF.

[0654] 100. The agent of any one of Embodiments 1-98, wherein X⁶ is TfeGA.

[0655] 101. The agent of any one of Embodiments 1-98, wherein X⁶ is Asp.

[0656] 102. The agent of any one of Embodiments 1-98, wherein X⁶ is Glu.

[0657] 103. The agent of any one of the preceding Embodiments, wherein X⁷ is a hydrophobic amino acid residue.

[0658] 104. The agent of any one of the preceding Embodiments, wherein X⁷ is Aib.

[0659] 105. The agent of any one of Embodiments 1-102, wherein X⁷ is Ala.

[0660] 106. The agent of any one of Embodiments 1-102, wherein X⁷ is CyLeu.

[0661] 107 The agent of any one of Embodiments 1-102, wherein X⁷ is Phe.

[0662] 108. The agent of any one of Embodiments 1-102, wherein X⁷ is nLeu.

[0663] 109. The agent of any one of Embodiments 1-102, wherein X⁷ is Val.

[0664] 110. The agent of any one of the preceding Embodiments, wherein X⁸ is a hydrophobic amino acid residue.

[0665] 111. The agent of any one of the preceding Embodiments, wherein X⁸ is Ala.

[0666] 112. The agent of any one of Embodiments 1-109, wherein X⁸ is Aib.

[0667] 113. The agent of any one of Embodiments 1-109, wherein X⁸ is Phe.

[0668] 114. The agent of any one of Embodiments 1-109, wherein X⁸ is Asp.

[0669] 115. The agent of any one of the preceding Embodiments, wherein X⁹ comprises a side chain which is or comprises an optionally substituted aromatic group.

[0670] 116. The agent of any one of the preceding Embodiments, wherein X⁹ is Phe, 2Thi, Tyr, 3Thi, 4FF, 4CIF, 4BrF, 3FF, 3CIF, 3BrF, 2FF, 30MeF, 4CNF, 3CNF, 4MeF, 3MeF, BztA, 1NapA, Trp or 3F3MeF.

[0671] 117. The agent of any one of the preceding Embodiments, wherein X⁹ is Phe.

[0672] 118. The agent of any one of the preceding Embodiments, wherein X¹² is selected from 3Thi, 2F3McF, Phe, nLeu, 2COOHF, CypA, 2CIF, Ala, Abu, Leu, hLeu, Npg, Cpa, Nva, Cba, ChA, 2FurA, 20MeF, 2MeF, 2BrF, 2CNF, 2NO₂F, 2PyrA, 3PyrA, 4PyrA, His, 1NapA, Val, Ile, Chg, DiethA, hnLeu, OctG, 2Thi, and 2cbmF.

[0673] 119. The agent of any one of the preceding Embodiments, wherein X¹² comprises a side chain which is or comprises an optionally substituted aromatic group.

[0674] 120. The agent of any one of the preceding Embodiments, wherein X¹² is 3Thi.

[0675] 121. The agent of any one of Embodiments 1-119, wherein X¹² is Phe.

[0676] 122. The agent of any one of Embodiments 1-119, wherein X¹² is 2F3MeF.

[0677] 123. The agent of any one of Embodiments 1-119, wherein X¹² is 2CIF.

[0678] 124 The agent of any one of Embodiments 1-119, wherein X¹² is BztA.

[0679] 125. The agent of any one of Embodiments 1-119, wherein X¹² is 2Thi.

[0680] 126. The agent of any one of Embodiments 1-119, wherein X¹² is 2MeF.

[0681] 127. The agent of any one of Embodiments 1-119, wherein X¹² is 2FF.

[0682] 128. The agent of any one of Embodiments 1-119, wherein X¹² is 34CIF.

[0683] 129. The agent any one of the preceding Embodiments, wherein the side chain of X¹³ comprises an optionally substituted aromatic group.

[0684] 130. The agent of any one of the preceding Embodiments, wherein X¹³ is BtzA.

[0685] 131. The agent of any one of Embodiments 1-129, wherein X¹³ is 2NapA.

[0686] 132. The agent of any one of Embodiments 1-129, wherein X¹³ is 34CIF.

[0687] 133. The agent of any one of Embodiments 1-129, wherein X¹³ is 3Thi.

[0688] 134. The agent of any one of Embodiments 1-129, wherein X¹³ is Phe.

[0689] 135. The agent of any one of Embodiments 1-129, wherein X¹³ is GlnR.

[0690] 136. The agent of any one of Embodiments 1-129, wherein X¹³ is 34MeF.

[0691] 137. The agent of any one of Embodiments 1-129, wherein X¹³ is 2NapA.

[0692] 138. The agent of any one of the preceding Embodiments, wherein X¹³ interacts with Gln379 of beta-catenin or an amino acid residue corresponding thereto.

[0693] 139. The agent of any one of the preceding Embodiments, wherein X¹³ interacts with Leu382 of beta-catenin or an amino acid residue corresponding thereto.

[0694] 140. The agent of any one of the preceding Embodiments, wherein X¹³ interacts with Val416 of beta-catenin or an amino acid residue corresponding thereto.

[0695] 141. The agent of any one of the preceding Embodiments, wherein X¹³ interacts with Asn415 of beta-catenin or an amino acid residue corresponding thereto.

[0696] 142. The agent of any one of the preceding Embodiments, wherein X¹³ interacts with Trp383 of beta-catenin or an amino acid residue corresponding thereto.

[0697] 143. The agent of any one of the preceding Embodiments, wherein p15 is 1.

[0698] 144. The agent of any one of Embodiments 1-142, wherein p15 is 0.

[0699] 145. The agent of any one of the preceding Embodiments, wherein p16 is 1.

[0700] 146. The agent of any one of Embodiments 1-144, wherein p16 is 0.

[0701] 147. The agent of any one of the preceding Embodiments, wherein p17 is 1.

[0702] 148. The agent of any one of Embodiments 1-146, wherein p17 is 0.

[0703] 149. The agent of any one of the preceding Embodiments, wherein p18 is 1.

[0704] 150. The agent of any one of Embodiments 1-148, wherein p18 is 0.

[0705] 151. The agent of any one of the preceding Embodiments, wherein p19 is 1.

[0706] 152. The agent of any one of Embodiments 1-148, wherein p19 is 0.

[0707] 153. The agent of any one of the preceding Embodiments, wherein p20 is 1.

[0708] 154. The agent of any one of Embodiments 1-152, wherein p20 is 0.

[0709] 155. The agent of any one of the preceding Embodiments, wherein p21 is 1.

[0710] 156. The agent of any one of Embodiments 1-154, wherein p21 is 0.

[0711] 157. The agent of any one of the preceding Embodiments, wherein p22 is 1.

[0712] 158. The agent of any one of Embodiments 1-156, wherein p22 is 0.

[0713] 159. The agent of any one of the preceding Embodiments, wherein p23 is 1.

[0714] 160 The agent of any one of Embodiments 1-158, wherein p23 is 0.

[0715] 161. The agent of any one of the preceding Embodiments, wherein the C-terminal group is R^{C}.

[0716] 162. The agent of any one of the preceding Embodiments, wherein the C-terminal group comprises a PEG moiety.

[0717] 163. The agent of any one of Embodiments 1-160, wherein the C-terminal group is —OH.

[0718] 164. The agent of any one of Embodiments 1-160, wherein the C-terminal group is —O-L^{RC}-R′.

[0719] 165. The agent of Embodiment 164, wherein L^{RC} is a covalent bond.

[0720] 166. The agent of Embodiment 164, wherein L^{RC} is optionally substituted C₁₋₆ alkylene.

[0721] 167. The agent of Embodiment 164, wherein L^{RC} is optionally substituted —CH₂—.

[0722] 168. The agent of any one of Embodiments 164-167, wherein the R′ is optionally substituted C₁₋₁₀ aliphatic.

[0723] 169. The agent of any one of Embodiments 164-167, wherein the R′ is optionally substituted C₁₋₁₀ alkyl.

[0724] 170. The agent of any one of Embodiments 164-167, wherein the R′ is optionally substituted C₁₋₃₀ heteroaliphatic having 1-10 heteroatoms.

[0725] 171. The agent of any one of Embodiments 164-167, wherein the R′ is optionally substituted C₁₋₃₀ heteroaliphatic having 1-10 oxygen atoms.

[0726] 172. The agent of any one of Embodiments 164-167, wherein the R′ is optionally substituted C₆₋₃₀ aryl.

[0727] 173. The agent of any one of Embodiments 164-167, wherein the R′ is optionally substituted 5-30 membered heteroaryl having 1-10 heteroatoms.

[0728] 174. The agent of any one of Embodiments 1-160, wherein the C-terminal group is —N(R)₂.

[0729] 175. The agent of any one of Embodiments 1-160, wherein the C-terminal group is —N(R)₂, wherein each R is independently —H or optionally substituted C₁₋₆ aliphatic.

[0730] 176. The agent of any one of Embodiments 1-160, wherein the C-terminal group is —NH₂.

[0731] 177. The agent of any one of Embodiments 1-160, wherein the C-terminal group is —NHMe.

[0732] 178. The agent of any one of Embodiments 1-160, wherein the C-terminal group is —NHEt.

[0733] 179. The agent of any one of Embodiments 1-160, wherein the C-terminal group is Serol.

[0734] 180. The agent of any one of Embodiments 1-160, wherein the C-terminal group is dAlaol.

[0735] 181. The agent of any one of the preceding Embodiments, wherein the peptide has the structure of:
[0736] R^{N}-[X]ₚ-[X°]ₚ₀X¹X²X³X⁴X⁵X⁶X⁷X⁸X⁹X¹⁰X¹¹X¹²X¹³X¹⁴[X¹⁵]ₚ₁₅[X¹⁶]ₚ₁₆[X¹⁷]ₚ₁₇—[X]p′-R^{C}, or a salt thereof, wherein:
[0737] each X is independently an amino acid residue;
[0738] each p and p′ is independently 0-10;
[0739] R^{N} is independently a peptide, an amino protecting group or R′-L^{RN}-;
[0740] R^{C} is independently a peptide, a carboxyl protecting group, -L^{RC}-R′, —O-L^{RC}-R′ or —N(R′)-L^{RC}-R′;
[0741] each of L^{RN} and L^{RC} is independently L;
[0742] each L is independently a covalent bond, or an optionally substituted, bivalent C₁-C₂₅ aliphatic or heteroaliphatic group having 1-10 heteroatoms, wherein one or more methylene units of the group are optionally and independently replaced with —C(R′)₂—, -Cy-, —O—, —S—, —S—S—, —N(R′)—, —C(O)—, —C(S)—, —C(NR′)—, —C(O)N(R′)—, —N(R′)C(O)N(R′)—, —N(R′)C(O)O—, —S(O)—, —S(O)₂—, —S(O)₂N(R′)—, —C(O)S—, or —C(O)O—;
[0743] each -Cy- is independently an optionally substituted bivalent, 3-30 membered, monocyclic, bicyclic or polycyclic ring having 0-10 heteroatoms;
[0744] each R′ is independently -R, —C(O)R, —CO₂R, or —SO₂R;
[0745] each R is independently —H, or an optionally substituted group selected from C₁₋₃₀ aliphatic, C₁₋₃₀ heteroaliphatic having 1-10 heteroatoms, C₆₋₃₀ aryl, C₆₋₃₀ arylaliphatic, C₆₋₃₀ arylheteroaliphatic having 1-10 heteroatoms, 5-30 membered heteroaryl having 1-10 heteroatoms, and 3-30 membered heterocyclyl having 1-10 heteroatoms, or
[0746] two R groups are optionally and independently taken together to form a covalent bond, or:
[0747] two or more R groups on the same atom are optionally and independently taken together with the atom to form an optionally substituted, 3-30 membered, monocyclic, bicyclic or polycyclic ring having, in addition to the atom, 0-10 heteroatoms; or
[0748] two or more R groups on two or more atoms are optionally and independently taken together with their intervening atom(s) to form an optionally substituted, 3-30 membered, monocyclic, bicyclic or polycyclic ring having, in addition to the intervening atom(s), 0-10 heteroatoms.

[0749] 182. The agent of any one of the preceding Embodiments, wherein p is 0.

[0750] 183. The agent of any one of the preceding Embodiments, wherein p is 1-10 (e.g., 1, 2, 3, 4, 5, 6, 7, 8, 9, or 10).

[0751] 184. The agent of any one of the preceding Embodiments, wherein p′ is 0.

[0752] 185. The agent of any one of Embodiments 1-183, wherein p′ is 1-10 (e.g., 1, 2, 3, 4, 5, 6, 7, 8, 9, or 10).

[0753] 186. The agent of any one of the preceding Embodiments, wherein R^{N} is —C(O)R.

[0754] 187. The agent of any one of the preceding Embodiments, wherein R^{N} is Ac.

[0755] 188. The agent of any one of the preceding Embodiments, wherein R^{C} is —N(R′)₂.

[0756] 189. The agent of any one of the preceding Embodiments, wherein R^{C} is —N(R)₂.

[0757] 190. The agent of any one of Embodiments 1-189, wherein R^{C} is —NH₂.

[0758] 191. The agent of any one of Embodiments 1-189, wherein R^{C} is —NHEt.

[0759] 192. The agent of any one of Embodiments 1-189, wherein R^{C} is -Alaol, wherein the amino group of -Alaol is bonded to the last —C(O)— of the peptide backbone (R^{C} is

[0760] 193. The agent of any one of Embodiments 1-189, wherein R^{C} is -dAlaol, wherein the amino group of -dAlaol is bonded to the last —C(O)— of the peptide backbone (R^{C} is

[0761] 194. The agent of any one of Embodiments 1-189, wherein R^{C} is -Prool, wherein the amino group of -Prool is bonded to the last —C(O)— of the peptide backbone (R^{C} is

[0762] 195. The agent of any one of Embodiments 1-189, wherein R^{C} is -Throl, wherein the amino group of -Throl is bonded to the last —C(O)— of the peptide backbone (R^{C} is

[0763] 196. The agent of any one of Embodiments 1-189, wherein R^{C} is -Serol, wherein the amino group of -Serol is bonded to the last —C(O)— of the peptide backbone (R^{C} is

[0764] 197. The agent of any one of Embodiments 1-187, wherein R^{C} is —O-L^{RC}-R′.

[0765] 198. The agent of Embodiment 197, wherein L^{RC} is a covalent bond.

[0766] 199. The agent of Embodiment 197, wherein L^{RC} is optionally substituted C₁₋₆ alkylene.

[0767] 200. The agent of Embodiment 197, wherein L^{RC} is optionally substituted —CH₂—.

[0768] 201. The agent of any one of Embodiments 197-200, wherein the R′ is optionally substituted C₁₋₁₀ aliphatic.

[0769] 202. The agent of any one of Embodiments 197-200, wherein the R′ is optionally substituted C₁₋₁₀ alkyl.

[0770] 203. The agent of any one of Embodiments 197-200, wherein the R′ is optionally substituted C₁₋₃₀ heteroaliphatic having 1-10 heteroatoms.

[0771] 204. The agent of any one of Embodiments 197-200, wherein the R′ is optionally substituted C₁₋₃₀ heteroaliphatic having 1-10 oxygen atoms.

[0772] 205. The agent of any one of Embodiments 197-200, wherein the R′ is optionally substituted C₆₋₃₀ aryl.

[0773] 206. The agent of any one of Embodiments 197-200, wherein the R′ is optionally substituted 5-30 membered heteroaryl having 1-10 heteroatoms.

[0774] 207. The agent of any one of Embodiments 1-187, wherein R^{C} is —OH.

[0775] 208. The agent of any one of the preceding Embodiments, wherein the peptide forms a structure that comprises a helix.

[0776] 209. The agent of any one of the preceding Embodiments, wherein the peptide binds to beta-catenin.

[0777] 210. The agent of any one of the preceding Embodiments, wherein the peptide binds to a polypeptide whose sequence is or comprising SEQ ID NO: 2, or a fragment thereof:

(SEQ ID NO: 2)
SVLFYAITTLHNLLLHQEGAKMAVRLAGGLQKMVALLNKTNVKFL
AITTDCLQILAYGNQESKLIILASGGPQALVNIMRTYTYEKLLWT
TSRVLKVLSVCSSNKPAIVEAGGMQALGLHLTDPSQRLVQNCLWT
LRNLSDAATKQEGMEGLLGTLVQLLGSDDINVVTCAAGILSNLTC
NNYKNKMMVCQVGGIEALVRT

[0778] 211. The agent of any one of the preceding Embodiments, wherein the agent interacts with Y306 of beta-catenin or an amino acid residue corresponding thereto.

[0779] 212. The agent of any one of the preceding Embodiments, wherein the agent interacts with G307 of beta-catenin or an amino acid residue corresponding thereto.

[0780] 213. The agent of any one of the preceding Embodiments, wherein the agent interacts with K312 of beta-catenin or an amino acid residue corresponding thereto.

[0781] 214. The agent of any one of the preceding Embodiments, wherein the agent interacts with K345 of beta-catenin or an amino acid residue corresponding thereto.

[0782] 215. The agent of any one of the preceding Embodiments, wherein the agent interacts with Q379 of beta-catenin or an amino acid residue corresponding thereto.

[0783] 216. The agent of any one of the preceding Embodiments, wherein the agent interacts with L382 of beta-catenin or an amino acid residue corresponding thereto.

[0784] 217. The agent of any one of the preceding Embodiments, wherein the agent interacts with W383 of beta-catenin or an amino acid residue corresponding thereto.

[0785] 218. The agent of any one of the preceding Embodiments, wherein the agent interacts with N387 of beta-catenin or an amino acid residue corresponding thereto.

[0786] 219. The agent of any one of the preceding Embodiments, wherein the agent interacts with D413 of beta-catenin or an amino acid residue corresponding thereto.

[0787] 220. The agent of any one of the preceding Embodiments, wherein the agent interacts with N415 of beta-catenin or an amino acid residue corresponding thereto.

[0788] 221. The agent of any one of the preceding Embodiments, wherein the agent interacts with V416 of beta-catenin or an amino acid residue corresponding thereto.

[0789] 222. An agent having a structure selected from Table E2 or a salt thereof.

[0790] 223. An agent having a structure selected from Table E3 or a salt thereof.

[0791] 224. An agent, having the structure of or a salt thereof.

[0792] 225. An agent, having the structure of

or a salt thereof.

[0793] 226. An agent, having the structure of

or a salt thereof.

[0794] 227. An agent, having the structure of

or a salt thereof.

[0795] 228. An agent, having the structure of

or a salt thereof.

[0796] 229. An agent, having the structure of

or a salt thereof.

[0797] 230. An agent, having the structure of

or a salt thereof.

[0798] 231. An agent, having the structure of

or a salt thereof.

[0799] 232. An agent, having the structure of

or a salt thereof.

[0800] 233. An agent, having the structure of

or a salt thereof.

[0801] 234. An agent, having the structure of

or a salt thereof.

[0802] 235. An agent, having the structure of

or a salt thereof.

[0803] 236. An agent, having the structure of

or a salt thereof.

[0804] 237. An agent, having the structure of

or a salt thereof.

[0805] 238. An agent, having the structure of

or a salt thereof.

[0806] 239. The agent of any one of the preceding Embodiments, wherein a double bond of a staple bonded to the first stapled amino acid that is bonded to a staple with a double bond, counting from the N-terminus, is E.

[0807] 240. The agent of any one of the preceding Embodiments, wherein a double bond of a staple bonded to the first stapled amino acid that is bonded to a staple with a double bond, counting from the N-terminus, is Z.

[0808] 241. The agent of any one of the preceding Embodiments, wherein a double bond of a staple bonded to the first stapled amino acid that is bonded to a staple with a double bond, counting from the C-terminus, is E.

[0809] 242. The agent of any one of the preceding Embodiments, wherein a double bond of a staple bonded to the first stapled amino acid that is bonded to a staple with a double bond, counting from the C-terminus, is Z.

[0810] 243. The agent of any one of the preceding Embodiments, wherein a double bond of a (i, i+7) staple is E.

[0811] 244. The agent of any one of the preceding Embodiments, wherein a double bond of a (i, i+7) staple is Z.

[0812] 245. The agent of any one of the preceding Embodiments, wherein a double bond of a (i, i+2), (i, i+3) or (i, i+4) staple is E.

[0813] 246. The agent of any one of the preceding Embodiments, wherein a double bond of a (i, i+2), (i, i+3) or (i, i+4) staple is Z.

[0814] 247. The agent of any one of Embodiments 222-238, wherein a double bond of a staple bonded to the first amino acid from the N-terminus is Z.

[0815] 248. The agent of any one of Embodiments 222-246, wherein a double bond of a staple bonded to the 11th amino acid from the N-terminus is E.

[0816] 249. The agent of any one of Embodiments 222-246, wherein a double bond of a staple bonded to the 11th amino acid from the N-terminus is Z.

[0817] 250. The agent of any one of the preceding Embodiments, wherein a carbon atom bonded to two staples (e.g., in B5) is of R configuration.

[0818] 251. The agent of any one of any one of the preceding Embodiments, wherein a carbon atom bonded to two staples (e.g., in B5) is of S configuration.

[0819] 252. An agent, having the structure of SP-1-1 or a salt thereof.

[0820] 253. An agent, having the structure of SP-1-2 or a salt thereof.

[0821] 254. An agent, having the structure of SP-1-3 or a salt thereof.

[0822] 255. An agent, having the structure of SP-1-4 or a salt thereof.

[0823] 256. An agent, having the structure of SP-1-5 or a salt thereof.

[0824] 257. An agent, having the structure of SP-1-6 or a salt thereof.

[0825] 258. An agent, having the structure of SP-1-7 or a salt thereof.

[0826] 259. An agent, having the structure of SP-1-8 or a salt thereof.

[0827] 260. An agent, having the structure of SP-2-1 or a salt thereof.

[0828] 261. An agent, having the structure of SP-2-2 or a salt thereof.

[0829] 262. An agent, having the structure of SP-2-3 or a salt thereof.

[0830] 263. An agent, having the structure of SP-2-4 or a salt thereof.

[0831] 264. An agent, having the structure of SP-2-5 or a salt thereof.

[0832] 265. An agent, having the structure of SP-2-6 or a salt thereof.

[0833] 266. An agent, having the structure of SP-2-7 or a salt thereof.

[0834] 267. An agent, having the structure of SP-2-8 or a salt thereof.

[0835] 268. An agent, having the structure of SP-3-1 or a salt thereof.

[0836] 269. An agent, having the structure of SP-3-2 or a salt thereof.

[0837] 270. An agent, having the structure of SP-4-1 or a salt thereof.

[0838] 271. An agent, having the structure of SP-4-2 or a salt thereof.

[0839] 272. An agent, having the structure of SP-4-3 or a salt thereof.

[0840] 273. An agent, having the structure of SP-4-4 or a salt thereof.

[0841] 274. An agent, having the structure of SP-4-5 or a salt thereof.

[0842] 275. An agent, having the structure of SP-4-6 or a salt thereof.

[0843] 276. An agent, having the structure of SP-4-7 or a salt thereof.

[0844] 277. An agent, having the structure of SP-4-8 or a salt thereof.

[0845] 278. An agent, having the structure of SP-5-1 or a salt thereof.

[0846] 279. An agent, having the structure of SP-5-2 or a salt thereof.

[0847] 280. An agent, having the structure of SP-5-3 or a salt thereof.

[0848] 281. An agent, having the structure of SP-5-4 or a salt thereof.

[0849] 282. An agent, having the structure of SP-5-5 or a salt thereof.

[0850] 283. An agent, having the structure of SP-5-6 or a salt thereof.

[0851] 284. An agent, having the structure of SP-5-7 or a salt thereof.

[0852] 285. An agent, having the structure of SP-5-8 or a salt thereof.

[0853] 286. An agent, having the structure of SP-6 or a salt thereof.

[0854] 287. An agent, having the structure of SP-7-1 or a salt thereof.

[0855] 288. An agent, having the structure of SP-7-2 or a salt thereof.

[0856] 289. An agent, having the structure of SP-7-3 or a salt thereof.

[0857] 290. An agent, having the structure of SP-7-4 or a salt thereof.

[0858] 291. An agent, having the structure of SP-7-5 or a salt thereof.

[0859] 292. An agent, having the structure of SP-7-6 or a salt thereof.

[0860] 293. An agent, having the structure of SP-7-7 or a salt thereof.

[0861] 294. An agent, having the structure of SP-7-8 or a salt thereof.

[0862] 295. An agent, having the structure of SP-8-1 or a salt thereof.

[0863] 296. An agent, having the structure of SP-8-2 or a salt thereof.

[0864] 297. An agent, having the structure of SP-8-3 or a salt thereof.

[0865] 298. An agent, having the structure of SP-8-4 or a salt thereof.

[0866] 299. An agent, having the structure of SP-8-5 or a salt thereof.

[0867] 300. An agent, having the structure of SP-8-6 or a salt thereof.

[0868] 301. An agent, having the structure of SP-8-7 or a salt thereof.

[0869] 302. An agent, having the structure of SP-8-8 or a salt thereof.

[0870] 303. An agent, having the structure of SP-9-1 or a salt thereof.

[0871] 304. An agent, having the structure of SP-9-2 or a salt thereof.

[0872] 305. An agent, having the structure of SP-9-3 or a salt thereof.

[0873] 306. An agent, having the structure of SP-9-4 or a salt thereof.

[0874] 307. An agent, having the structure of SP-9-5 or a salt thereof.

[0875] 308. An agent, having the structure of SP-9-6 or a salt thereof.

[0876] 309. An agent, having the structure of SP-9-7 or a salt thereof.

[0877] 310. An agent, having the structure of SP-9-8 or a salt thereof.

[0878] 311. An agent, having the structure of SP-10-1 or a salt thereof.

[0879] 312. An agent, having the structure of SP-10-2 or a salt thereof.

[0880] 313. An agent, having the structure of SP-10-3 or a salt thereof.

[0881] 314. An agent, having the structure of SP-10-4 or a salt thereof.

[0882] 315. An agent, having the structure of SP-10-5 or a salt thereof.

[0883] 316. An agent, having the structure of SP-10-6 or a salt thereof.

[0884] 317. An agent, having the structure of SP-10-7 or a salt thereof.

[0885] 318. An agent, having the structure of SP-10-8 or a salt thereof.

[0886] 319. An agent, having the structure of SP-11-1 or a salt thereof.

[0887] 320. An agent, having the structure of SP-11-2 or a salt thereof.

[0888] 321. An agent, having the structure of SP-11-3 or a salt thereof.

[0889] 322. An agent, having the structure of SP-11-4 or a salt thereof.

[0890] 323. An agent, having the structure of SP-11-5 or a salt thereof.

[0891] 324. An agent, having the structure of SP-11-6 or a salt thereof.

[0892] 325. An agent, having the structure of SP-11-7 or a salt thereof.

[0893] 326. An agent, having the structure of SP-11-8 or a salt thereof.

[0894] 327. An agent, having the structure of SP-12-1 or a salt thereof.

[0895] 328. An agent, having the structure of SP-12-2 or a salt thereof.

[0896] 329. An agent, having the structure of SP-12-3 or a salt thereof.

[0897] 330. An agent, having the structure of SP-12-4 or a salt thereof.

[0898] 331. An agent, having the structure of SP-12-5 or a salt thereof.

[0899] 332. An agent, having the structure of SP-12-6 or a salt thereof.

[0900] 333. An agent, having the structure of SP-12-7 or a salt thereof.

[0901] 334. An agent, having the structure of SP-12-8 or a salt thereof.

[0902] 335. An agent, having the structure of SP-13-1 or a salt thereof.

[0903] 336. An agent, having the structure of SP-13-2 or a salt thereof.

[0904] 337. An agent, having the structure of SP-13-3 or a salt thereof.

[0905] 338. An agent, having the structure of SP-13-4 or a salt thereof.

[0906] 339. An agent, having the structure of SP-13-5 or a salt thereof.

[0907] 340. An agent, having the structure of SP-13-6 or a salt thereof.

[0908] 341. An agent, having the structure of SP-13-7 or a salt thereof.

[0909] 342. An agent, having the structure of SP-13-8 or a salt thereof.

[0910] 343. An agent, having the structure of SP-14-1 or a salt thereof.

[0911] 344. An agent, having the structure of SP-14-2 or a salt thereof.

[0912] 345. An agent, having the structure of SP-14-3 or a salt thereof.

[0913] 346. An agent, having the structure of SP-14-4 or a salt thereof.

[0914] 347. An agent, having the structure of SP-14-5 or a salt thereof.

[0915] 348. An agent, having the structure of SP-14-6 or a salt thereof.

[0916] 349. An agent, having the structure of SP-14-7 or a salt thereof.

[0917] 350. An agent, having the structure of SP-14-8 or a salt thereof.

[0918] 351. An agent, having the structure of SP-15-1 or a salt thereof.

[0919] 352. An agent, having the structure of SP-15-2 or a salt thereof.

[0920] 353. An agent, having the structure of SP-15-3 or a salt thereof.

[0921] 354. An agent, having the structure of SP-15-4 or a salt thereof.

[0922] 355. An agent, having the structure of SP-15-5 or a salt thereof.

[0923] 356. An agent, having the structure of SP-15-6 or a salt thereof.

[0924] 357. An agent, having the structure of SP-15-7 or a salt thereof.

[0925] 358. An agent, having the structure of SP-15-8 or a salt thereof.

[0926] 359. An agent having the structure of

or a salt thereof.

[0927] 360. An agent having the structure of

or a salt thereof.

[0928] 361. An agent having the structure of

or a salt thereof.

[0929] 362. The agent of any one of Embodiments 359-361, wherein the agent has the same retention time under a HPLC condition as I-66 prepared as described in Example 3, wherein the HPLC condition can separate I-66 and I-67 prepared as described in Example 3.

[0930] 363. The agent of any one of Embodiments 359-361, wherein the agent shows a retention time of about 15.3 min under the following HPLC condition: Agilent Poroshell 120 EC-C18; 4.6×100 mm; solvent A=0.1% TFA in water; solvent B=0.075% TFA in acetonitrile; gradient is 10% B to 95% B over 30 min; detection is UV absorbance at 220 nM.

[0931] 364. The agent of any one of Embodiments 359-363, wherein the agent elutes in a single peak with I-66 prepared as described in Example 3 under the following HPLC condition: Agilent Poroshell 120 EC-C18; 4.6×100 mm; solvent A=0.1% TFA in water; solvent B=0.075% TFA in acetonitrile; gradient is 10% B to 95% B over 30 min; detection is UV absorbance at 220 nM.

[0932] 365. The agent of any one of Embodiments 359-364, characterized in that the agent shows ¹H NMR peaks that overlap with the peaks between about 5.1-5.7 in FIG. 6 under the same or comparable conditions. 366. The agent of any one of Embodiments 359-364, characterized in that the agent shows the same 1H NMR peaks between about 5.1-5.7 as FIG. 6 under the same or comparable conditions.

[0933] 367. The agent of any one of Embodiments 359-364, characterized in that in its ¹H NMR spectrum, the peaks corresponding to 1H bonded to carbon atoms overlap with peaks in FIG. 6 under the same or comparable conditions.

[0934] 368. The agent of any one of Embodiments 359-364, characterized in that its ¹H NMR spectrum overlaps with peaks in FIG. 6 under the same or comparable conditions.

[0935] 369. The agent of any one of Embodiments 359-364, characterized in that the agent shows ¹H NMR peaks that overlap with the peaks between about 5.1-5.7 in FIG. 9 under the same or comparable conditions.

[0936] 370. The agent of any one of Embodiments 359-364, characterized in that the agent shows the same 1H NMR peaks between about 5.1-5.7 as FIG. 9 under the same or comparable conditions.

[0937] 371. The agent of any one of Embodiments 359-364, characterized in that in its ¹H NMR spectrum, the peaks corresponding to 1H bonded to carbon atoms overlap with peaks in FIG. 9 under the same or comparable conditions.

[0938] 372. The agent of any one of Embodiments 359-364, characterized in that its ¹H NMR spectrum overlaps with peaks in FIG. 9 under the same or comparable conditions.

[0939] 373. The agent of any one of Embodiments 359-364, characterized in that its ¹H NMR spectrum comprises the following peaks (methanol-d4, about 298K, about 900 MHz, chemical shift): 3.96, 6.34, 6.84, 6.36, 4.38, 4.31, 3.82, 4.21, 7.21, 7.24, 7.07, 7.24, 7.21, 4.03, 4.25, 7.97, 7.94, 7.42, 7.50, 4.40, 5.29, 5.31, 4.27, 4.31, 5.56, 5.36, 7.89, 7.38, 7.41, 7.89, 7.00, 4.30, 2.00, 2.10, 1.60, 1.65, 3.73, 4.15, 3.15, 4.22, 2.29, 2.41, 3.53, 3.25, 3.06, 2.95, 1.93, 2.38, 2.92, 3.45, 1.18, 1.36, 1.55, 1.84, 1.53, 3.27, 3.31, 3.27, 3.44, 2.74, 2.96, 1.92, 2.07, 1.37, 2.38, 1.80, 1.88, 2.71, 2.81, 3.20, 2.05, 1.97, 2.17, 0.84, 1.42, 1.57, 2.69, 3.76, 3.92, 2.20, 2.42, 2.22, 3.08, 3.40, 1.55, 1.07, 1.42, 1.59, 1.33, and 2.23.

[0940] 374. The agent of any one of Embodiments 359-364, characterized in that chemical shifts of ¹H bonded to carbon of the agent are (methanol-d4, about 298K, about 900 MHz): 3.96, 6.34, 6.84, 6.36, 4.38, 4.31, 3.82, 4.21, 7.21, 7.24, 7.07, 7.24, 7.21, 4.03, 4.25, 7.97, 7.94, 7.42, 7.50, 4.40, 5.29, 5.31, 4.27, 4.31, 5.56, 5.36, 7.89, 7.38, 7.41, 7.89, 7.00, 4.30, 2.00, 2.10, 1.60, 1.65, 3.73, 4.15, 3.15, 4.22, 2.29, 2.41, 3.53, 3.25, 3.06, 2.95, 1.93, 2.38, 2.92, 3.45, 1.18, 1.36, 1.55, 1.84, 1.53, 3.27, 3.31, 3.27, 3.44, 2.74, 2.96, 1.92, 2.07, 1.37, 2.38, 1.80, 1.88, 2.71, 2.81, 3.20, 2.05, 1.97, 2.17, 0.84, 1.42, 1.57, 2.69, 3.76, 3.92, 2.20, 2.42, 2.22, 3.08, 3.40, 1.55, 1.07, 1.42, 1.59, 1.33, and 2.23.

[0941] 375. The agent of any one of Embodiments 359-364 and 373-374, characterized in that ¹H NMR of the agent comprises the following peaks, or peaks corresponding to the following peaks (methanol-d4, about 298K, about 900 MHz, chemical shift): 8.32, 7.73, 8.17, 8.19, 8.25, 8.44, 8.89, 8.10, 8.42, 7.45, 7.39, 8.15, 8.86, and 7.69.

[0942] 376. The agent of any one of Embodiments 359-364 and 373-375, characterized in that ¹³C NMR of the agent comprises the following peaks (methanol-d4, about 298K, about 226 MHz, chemical shift): 65.89, 137.36, 138.13, 57.28, 138.06, 132.12, 169.51, 62.78, 31.36, 70.51, 132.57, 139.58, 141.98, 156.51, 173.13, 175.55, 175.8, 174.47, 175.8, 177.56, 178.58, 174.39, 175.7, 177.0, 175.8, 175.44, 175.6, 176.97, 175.55, 178.08, 172.38, 59.94, 123.42, 125.19, 129.15, 56.93, 55.69, 57.70, 60.70, 130.39, 129.83, 128.08, 129.83, 130.39, 54.54, 60.94, 131.96, 129.37, 129.54, 135.08, 55.56, 131.26, 131.47, 56.48, 55.33, 129.2, 126.96, 122.71, 125.37, 125.20, 123.87, 126.99, 51.20, 29.99, 30.63, 67.18, 53.94, 31.81, 45.37, 32.60, 27.47, 33.84, 39.25, 23.2, 35.8, 29.61, 38.18, 38.10, 36.18, 30.00, 23.32, 33.8, 45.96, 35.69, 33.09, 27.46, 23.29, 35.96, 49.50, 24.46, 36.46, 31.76, 17.00, 30.18, 17.76, 28.98, 23.20, 23.87, 172.48, and 174.10.

[0943] 377. The agent of any one of Embodiments 359-364 and 373-375, characterized in that chemical shifts of ¹³C of the agent are (methanol-d4, about 298K, about 226 MHz, chemical shift): 65.89, 137.36, 138.13, 57.28, 138.06, 132.12, 169.51, 62.78, 31.36, 70.51, 132.57, 139.58, 141.98, 156.51, 173.13, 175.55, 175.8, 174.47, 175.8, 177.56, 178.58, 174.39, 175.7, 177.0, 175.8, 175.44, 175.6, 176.97, 175.55, 178.08, 172.38, 59.94, 123.42, 125.19, 129.15, 56.93, 55.69, 57.70, 60.70, 130.39, 129.83, 128.08, 129.83, 130.39, 54.54, 60.94, 131.96, 129.37, 129.54, 135.08, 55.56, 131.26, 131.47, 56.48, 55.33, 129.2, 126.96, 122.71, 125.37, 125.20, 123.87, 126.99, 51.20, 29.99, 30.63, 67.18, 53.94, 31.81, 45.37, 32.60, 27.47, 33.84, 39.25, 23.2, 35.8, 29.61, 38.18, 38.10, 36.18, 30.00, 23.32, 33.8, 45.96, 35.69, 33.09, 27.46, 23.29, 35.96, 49.50, 24.46, 36.46, 31.76, 17.00, 30.18, 17.76, 28.98, 23.20, 23.87, 172.48, and 174.10.

[0944] 378. The agent of any one of Embodiments 359-364 and 373-377, characterized in that its ¹³C NMR spectrum overlaps with peaks in FIG. 12 under the same or comparable conditions.

[0945] 379. The agent of any one of Embodiments 359-364, characterized in that its NMR spectra are the same or of the same compound as one or more or all of FIG. 9 to FIG. 18 under the same or comparable conditions.

[0946] 380. The agent of any one of Embodiments 359-364, characterized in that its NMR spectra are the same or of the same compound as all of FIG. 9 to FIG. 18 under the same or comparable conditions.

[0947] 381. An agent having the structure of

or a salt thereof.

[0948] 382. The agent of any one of Embodiments 359-361, wherein the agent has the same retention time under a HPLC condition as I-67 prepared as described in Example 3, wherein the HPLC condition can separate I-66 and I-67 prepared as described in Example 3.

[0949] 383. The agent of any one of Embodiments 359-361, wherein the agent shows a retention time of about 16.2 min under the following HPLC condition: Agilent Poroshell 120 EC-C18; 4.6×100 mm; solvent A=0.1% TFA in water; solvent B=0.075% TFA in acetonitrile; gradient is 10% B to 95% B over 30 min; detection is UV absorbance at 220 nM.

[0950] 384. The agent of any one of Embodiments 359-361, wherein the agent elutes in a single peak with I-67 prepared as described in Example 3 under the following HPLC condition: Agilent Poroshell 120 EC-C18; 4.6×100 mm; solvent A=0.1% TFA in water; solvent B=0.075% TFA in acetonitrile; gradient is 10% B to 95% B over 30 min; detection is UV absorbance at 220 nM.

[0951] 385. The agent of any one of Embodiments 359-361 and 382-384, characterized in that the agent shows 1H NMR peaks that do not overlap with the peaks between about 5.1-5.7 in FIG. 6 under the same or comparable conditions.

[0952] 386. The agent of any one of Embodiments 359-361 and 382-384, characterized in that the agent does not show the same ¹H NMR peaks between about 5.1-5.7 as FIG. 6 under the same or comparable conditions.

[0953] 387. The agent of any one of Embodiments 359-361 and 382-384, characterized in that in its ¹H NMR spectrum, the peaks corresponding to ¹H bonded to carbon atoms do not all overlap with peaks in FIG. 6 under the same or comparable conditions.

[0954] 388. The agent of any one of Embodiments 359-361, characterized in that its ¹H NMR spectrum does not overlap with peaks in FIG. 6 under the same or comparable conditions.

[0955] 389. The agent of any one of the preceding Embodiments, wherein each olefin double bond in a staple is converted into a single bond.

[0956] 390. The agent of any one of the preceding Embodiments, wherein each olefin double bond is converted into a single bond.

[0957] 391. The agent of any one of the preceding Embodiments, wherein each olefin double bond is independently and optionally converted into —CHR′—CHR′—, wherein each R is independently —H, -R, —OR, —OH, —N(R)₂, or —SR.

[0958] 392. The agent of any one of the preceding Embodiments, wherein each olefin double bond is independently converted into optionally substituted —CH₂—CH₂—.

[0959] 393. An agent of any one of Embodiments 1-1900 and 2073-2089 of WO 2022/261257.

[0960] 394. The agent of any one of the preceding Embodiments, having a diastereopurity of about 80%, 85%, 90%, 91%, 92%, 93%, 94%, 95%, 96%, 97%, 98%, 99% or more.

[0961] 395. The agent of any one of the preceding Embodiments, having a purity of about 80%, 85%, 90%, 91%, 92%, 93%, 94%, 95%, 96%, 97%, 98%, 99% or more.

[0962] 396. The agent of any one of the preceding Embodiments, having a purity of about 90% or more. 397. The agent of any one of the preceding Embodiments, having a purity of about 95% or more.

[0963] 398. The agent of any one of the preceding Embodiments, having a purity of about 98% or more.

[0964] 399. A composition comprising an agent of any one of the preceding Embodiments or a salt thereof.

[0965] 400. A pharmaceutical composition, comprising or delivering an agent of any one of the preceding Embodiments, and a pharmaceutically acceptable carrier.

[0966] 401. A composition selected from Table E2.

[0967] 402. A pharmaceutical composition, comprising or delivering one or more or all peptide agents in a composition selected from Table E2 and a pharmaceutically acceptable carrier.

[0968] 403. A composition selected from Table E3.

[0969] 404. A pharmaceutical composition, comprising or delivering one or more or all peptide agents in a composition selected from Table E3 and a pharmaceutically acceptable carrier.

[0970] 405. The composition of any one of the preceding Embodiments, comprising an agent comprising one or more staples each independently comprises one or more olefin double bond.

[0971] 406. The composition of any one of the preceding Embodiments, wherein each ratio of the two stereoisomers of each olefin double bond in each staple is independently about 2:1, 3:1, 4:1, 5:1, 6:1, 7:1, 8:1, 9:1, 10:1, 15:1, 20:1, 30:1, 40:1, 50:1 or more.

[0972] 407. The composition of any one of the preceding Embodiments, wherein a selectivity is favoring an E configuration.

[0973] 408. The composition of any one of the preceding Embodiments, wherein a selectivity is favoring a Z configuration.

[0974] 409. A composition of any one of Embodiments 2090-2108 of WO 2022/261257.

[0975] 410. The composition of any one of the preceding Embodiments, characterized in that characterized in that when the composition is administered to a hepatocellular cell, proliferation of the cell is reduced.

[0976] 411. The composition of Embodiment 410, wherein the hepatocellular cancer cell comprises a mutation in beta-catenin.

[0977] 412. The composition of any one of the preceding Embodiments, characterized in that characterized in that when the composition is administered to a hepatocellular tumor, growth of the tumor is reduced.

[0978] 413. The composition of Embodiment 412, wherein the hepatocellular tumor comprises hepatocellular cancer cells comprising a mutation in beta-catenin.

[0979] 414. The composition of Embodiment 411 or 413, wherein the mutation is D32H.

[0980] 415. The composition of Embodiment 411 or 413, wherein the mutation is D32V.

[0981] 416. The composition of Embodiment 411 or 413, wherein the mutation is S37C.

[0982] 417. The composition of Embodiment 411 or 413, wherein the mutation is S45F.

[0983] 418. The compositions of any one of Embodiments 410-417, wherein the reduction is compared to a reference.

[0984] 419. The composition of Embodiment 418, wherein the reference is absence of administration of the agent.

[0985] 420. The composition of Embodiment 418, wherein the reference is administration of a reference agent.

[0986] 421. The composition of Embodiment 418, wherein the reference is administration of I-470.

[0987] 422. The composition of any one of Embodiments 412-421, wherein the tumor is in a mouse PDX model.

[0988] 423. The composition of Embodiment 422, wherein one or each dose administered to a mouse is independently about 20-80 mg/kg.

[0989] 424. The composition of Embodiment 422, wherein one or each dose administered to a mouse is independently about 60 mg/kg.

[0990] 425. The composition of any one of Embodiments 410-424, wherein reduction is observed after about 1, 2, 3, 4, 5, 6, 7, 8, 9, or 10 doses.

[0991] 426. A method for modulating beta-catenin interaction with a partner in a system, comprising contacting beta-catenin with an agent or composition of any one of the preceding Embodiments.

[0992] 427. A method for modulating beta-catenin interaction with a partner in a system, comprising administering or delivering to the system an agent or composition of any one of the preceding Embodiments.

[0993] 428. The method of nay one of Embodiments 426-427, wherein the partner is TCF7, LEF1, TCF7L1, TCF7L2, Axin1, Axin2, or APC.

[0994] 429. A method for modulating a TCF-beta-catenin interaction in a system, comprising contacting beta-catenin with an agent or composition of any one of the preceding Embodiments.

[0995] 430. A method for modulating a TCF-beta-catenin interaction in a system, comprising administering or delivering to the system an agent or composition of any one of the preceding Embodiments.

[0996] 431. A method for inhibiting beta-catenin dependent cell proliferation, comprising administering or delivering to the system an agent or composition of any one of the preceding Embodiments.

[0997] 432. A method for modulating WNT/beta-catenin pathway in a system, comprising administering or delivering to the system an agent or composition of any one of the preceding Embodiments, wherein expression of a nucleic acid is modulated.

[0998] 433. A method, comprising administering or delivering to the system an agent or composition of any one of the preceding Embodiments, wherein level of a transcript of a nucleic acid and/or a product thereof is modulated.

[0999] 434. A method, comprising administering or delivering to the system an agent or composition of any one of the preceding Embodiments, wherein expression of a nucleic acid is modulated.

[1000] 435. A method for reducing hepatocellular cancer cell proliferation in a system, comprising administering or delivering to the hepatocellular cancer cell an effective amount of an agent or composition of any one of the preceding Embodiments.

[1001] 436. A method for reducing hepatocellular tumor growth in a system, comprising administering or delivering to the tumor an effective amount of an agent or composition of any one of the preceding Embodiments.

[1002] 437. The method of any one of Embodiments 435-436, wherein the reduction is compared to a reference.

[1003] 438. The composition of Embodiment 437, wherein the reference is absence of administration of the agent.

[1004] 439. The composition of Embodiment 437, wherein the reference is administration of a reference agent.

[1005] 440. The composition of Embodiment 437, wherein the reference is administration of I-470.

[1006] 441. The method of any one of Embodiments 426-440, wherein a system is an in vitro system.

[1007] 442. The method of any one of Embodiments 426-440, wherein a system is an in vivo system.

[1008] 443. The method of any one of Embodiments 426-440, wherein a system is or comprises a sample.

[1009] 444. The method of any one of Embodiments 426-443, wherein a system is or comprises a cell, tissue or organ.

[1010] 445. The method of any one of Embodiments 426-444, wherein a system is or comprises cancer cells.

[1011] 446. The method of any one of Embodiments 426-445, wherein a system is or comprises a tumor.

[1012] 447. The method of any one of Embodiments 426-446, wherein a system is a subject.

[1013] 448. The method of any one of Embodiments 426-447, wherein a system comprises hepatocellular cancer cells.

[1014] 449. The method of any one of Embodiments 435-440 and 448, wherein the hepatocellular cancer cells comprise a mutation in beta-catenin.

[1015] 450. A method for treating hepatocellular cancer in a subject, comprising administering or delivering to the subject an effective amount of an agent or composition of any one of the preceding Embodiments.

[1016] 451. The method of Embodiment 450, wherein the subject comprises hepatocellular cancer cells that comprise a mutation in beta-catenin.

[1017] 452. The method of Embodiment 449 or 451, wherein the mutation is D32H.

[1018] 453. The method of Embodiment 449 or 451, wherein the mutation is D32H.

[1019] 454. The method of Embodiment 449 or 451, wherein the mutation is S37C.

[1020] 455. The method of Embodiment 449 or 451, wherein the mutation is S45F.

[1021] 456. The method of any one of the preceding Embodiments, comprising administering or deliver to a system or subject a second therapeutic agent.

[1022] 457. The method of any one of the preceding Embodiments, comprising administering or deliver to a system or subject a second therapy.

[1023] 458. The method of Embodiment 456 or 457, wherein a second therapeutic agent or therapy is administered prior to an agent of any one of the preceding Embodiments.

[1024] 459. The method of Embodiment 456 or 457, wherein a second therapeutic agent or therapy is administered about or no more than about 1, 2, 3, 4, 5, 6, or 7 days, or 1, 2, 3, or weeks, or 1, 2, 3, 4, 5, or 6 months, prior to an agent of any one of the preceding Embodiments.

[1025] 460. The method of Embodiment 456 or 457, wherein a second therapeutic agent or therapy is administered concurrently with an agent of any one of the preceding Embodiments.

[1026] 461. The method of Embodiment 456 or 457, wherein a second therapeutic agent or therapy is administered subsequently to an agent of any one of the preceding Embodiments.

[1027] 462. The method of Embodiment 456 or 457, wherein a second therapeutic agent or therapy is administered about or no more than about 1, 2, 3, 4, 5, 6, or 7 days, or 1, 2, 3, or weeks, or 1, 2, 3, 4, 5, or 6 months, subsequently to an agent of any one of the preceding Embodiments.

[1028] 463. The method of any one of the preceding Embodiments, wherein a subject is exposed to a second therapeutic agent or therapy and an agent of any one of the preceding Embodiments.

[1029] 464. The method of any one of the preceding Embodiments, wherein a subject is exposed to a therapeutic effect of a second therapeutic agent or therapy and a therapeutic effect of an agent of any one of the preceding Embodiments.

[1030] 465. The method of any one of the preceding Embodiments, wherein a second therapeutic agent is or comprises a chemotherapy agent.

[1031] 466. The method of any one of the preceding Embodiments, wherein a second therapeutic agent is or comprises a hormone therapy agent.

[1032] 467. The method of any one of the preceding Embodiments, wherein a second therapeutic agent is or comprises an immunotherapy agent.

[1033] 468. The method of any one of the preceding Embodiments, wherein a second therapeutic agent is or comprises a checkpoint inhibitor.

[1034] 469. The method of any one of the preceding Embodiments, wherein a second therapeutic agent is or comprises an antibody.

[1035] 470. The method of any one of the preceding Embodiments, wherein a second therapeutic agent is or comprises a CTLA-4, PD-1 or PD-L1 inhibitor.

[1036] 471. The method of any one of the preceding Embodiments, wherein a second therapeutic agent is or comprises a cell.

[1037] 472. The method of any one of the preceding Embodiments, wherein the second therapeutic agent reduces one or more side effects of an agent or composition of any one of the preceding Embodiments.

[1038] 473. The method of any one of the preceding Embodiments, wherein the agent or composition reduces one or more side effects of a second therapeutic agent.

[1039] 474. The method of any one of the preceding Embodiments, wherein a second therapy is or comprises surgery.

[1040] 475. The method of any one of the preceding Embodiments, wherein a second therapy is or comprises chemotherapy.

[1041] 476. The method of any one of the preceding Embodiments, wherein a second therapy is or comprises radiotherapy.

[1042] 477. The method of any one of the preceding Embodiments, wherein a second therapy is or comprises hormone therapy.

[1043] 478. The method of any one of the preceding Embodiments, wherein a second therapy is or comprises stem cell or bone marrow transplant.

[1044] 479. The method of any one of the preceding Embodiments, wherein a second therapy is or comprises immunotherapy.

[1045] 480. The method of any one of the preceding Embodiments, wherein a second therapy is or comprises T-cell therapy.

[1046] 481. The method of any one of the preceding Embodiments, wherein a second therapy is or comprises CAR T-cell therapy.

[1047] 482. The method of any one of the preceding Embodiments, wherein a second therapy is or comprises administering to the subject a population of immune cells.

[1048] 483. The method of any one of the preceding Embodiments, wherein the agent or composition reduces one or more side effects of a second therapy.

[1049] 484. The method of any one of the preceding Embodiments, wherein unit dose of a second therapy or therapeutic agent is reduced compared to when it is administered alone.

[1050] 485. The method of any one of the preceding Embodiments, wherein total dose of a second therapy or therapeutic agent is reduced compared to when it is administered alone.

[1051] 486. The method of any one of the preceding Embodiments, wherein unit dose of an agent or composition of any one of the preceding Embodiments is reduced compared to when it is administered alone.

[1052] 487. The method of any one of the preceding Embodiments, wherein total dose of an agent or composition of any one of the preceding Embodiments is reduced compared to when it is administered alone. 488. The method of any one of the preceding Embodiments, wherein the combination therapy provides higher efficacy than when an agent or composition is administered or delivered alone.

[1053] 489. The method of any one of the preceding Embodiments, wherein the combination therapy provides higher efficacy than when a second therapeutic agent or therapy is administered or delivered alone. 490. The method of any one of the preceding Embodiments, comprising assessing level of a transcript of a nucleic acid and/or a product thereof.

[1054] 491. The method of any one of the preceding Embodiments, comprising collecting a sample from a subject, and assessing level of a transcript of a nucleic acid and/or a product thereof in the sample.

[1055] 492. The method of Embodiment 491, wherein a sample is or comprises a cell, tissue or organ.

[1056] 493. The method of any one of Embodiments 491-492, wherein a sample is or comprises cancer cells.

[1057] 494. The method of any one of Embodiments 491-493, wherein a sample is or comprises hepatocellular cancer cells.

[1058] 495. The method of any one of Embodiments 491-494, wherein a sample comprises cells from a tumor.

[1059] 496. The method of any one of Embodiments 491-495, wherein a sample comprises tissues from a tumor.

[1060] 497. The method of any one of Embodiments 491-496, wherein a sample is or comprises a tumor.

[1061] 498. The method of any one of Embodiments 491-497, wherein a sample is from a tumor.

[1062] 499. The method of any one of Embodiments 491-498, wherein a sample is from a biopsy.

[1063] 500. The method of any one of Embodiments 491-499, wherein a sample is collected after one or more administrations or deliveries.

[1064] 501. The method of any one of Embodiments 491-500, wherein an assessment is conducted after one or more administrations or deliveries.

[1065] 502. The method of any one of Embodiments 491-501, wherein a nucleic acid is or comprises a gene.

[1066] 503. The method of any one of Embodiments 491-502, wherein a nucleic acid is selected from gene set BCAT_GDS748_UP, BCAT.100_UP.V1_UP, HALLMARK_WNT_BETA-CATENIN_SIGNALING, RASHI-RESPONSE_TO_IONIZING-RADIATION_1, REACTOME-RRNA_PROCESSING, HALLMARK_MYC_TARGETS_V1, HALLMARK_MYC_TARGETS_V2, HALLMARK_OXIDATIVE_PHOSPHORYLATION, HALLMARK_E2F_TARGETS, or HALLMARK_TNFA_SIGNALING_VIA_NFKB.

[1067] 504. The method of any one of Embodiments 491-503, wherein a nucleic acid is CCND2.

[1068] 505. The method of any one of Embodiments 491-504, wherein a nucleic acid is WNT5B.

[1069] 506. The method of any one of Embodiments 491-505, wherein a nucleic acid is AXIN2.

[1070] 507. The method of any one of Embodiments 491-506, wherein a nucleic acid is NKD1.

[1071] 508. The method of any one of Embodiments 491-507, wherein a nucleic acid is WNT6.

[1072] 509. The method of any one of Embodiments 491-508, wherein a nucleic acid is DKK1.

[1073] 510. The method of any one of Embodiments 491-503, wherein the nucleic acid is DKK4.

[1074] 511. The method of any one of Embodiments 491-510, wherein administration or delivery continues for one or more times after the assessment.

[1075] 512. The method of any one of Embodiments 491-511, comprising evaluating an assessment and continue the administration or delivery.

[1076] 513. The method of any one of Embodiments 491-512, wherein administration or deliver is adjusted after an assessment.

[1077] 514. The method of any one of Embodiments 491-513, comprising evaluating an assessment and adjusting the administration or delivery.

[1078] 515. The method of any one of Embodiments 491-502, wherein administration or deliver is discontinued after an assessment.

[1079] 516. The method of any one of Embodiments 491-501 and 515, comprising evaluating an assessment and discontinuing the administration or delivery.

[1080] 517. An agent, compound, composition or method of any one of the preceding Embodiments, wherein a tissue, organ, subject or system comprises a hepatocellular cancer cell that comprises another mutation.

[1081] 518. An agent, compound, composition or method of any one of the preceding Embodiments, wherein a tissue, organ, subject or system comprises a hepatocellular cancer cell that comprises a MSH6 mutation.

[1082] 519. An agent, compound, composition or method of any one of the preceding Embodiments, wherein a tissue, organ, subject or system comprises a hepatocellular cancer cell that is MSI-H.

[1083] 520. An agent, compound, or composition of any one of the preceding Embodiments, prepared and/or characterized by a method of any one of the preceding Embodiments.

### EXEMPLIFICATION

[1084] Those skilled in the art appreciate that various technologies are available for manufacturing and assessing provided agents including various peptides such as stapled peptides in accordance with the present disclosure, for example, many technologies for preparing small molecules and peptides can be utilized to prepare provided agents, and various assays are available for assessing properties and/or activities of provided agents. Described below are certain such useful technologies. As demonstrated herein, in some embodiments, it is confirmed that provided technologies can exhibit nanomolar cell-based activity in protein-protein interaction (PPI), transcriptional regulation, proliferation assays, etc. In some embodiments, it is confirmed that provided technologies possess favorable pharmacokinetic properties. In some embodiments, in vivo dosing of provided technologies confirms on-target pharmacodynamic modulation of β-catenin activity and strong anti-tumor activity in multiple human xenograft models, which confirm that provided technologies are useful for treating various conditions, disorders or diseases as described herein.

### Example 1. Preparation of Compounds

[1085] Among other things, peptides can be prepared using various peptide synthesis technologies in accordance with the present disclosure. In many embodiments, peptides were prepared using Fmoc-based synthesis, often on suitable solid phase. For various stapled peptides, amino acid residues were stapled through suitable chemistry, e.g., olefin metathesis for amino acids that comprise olefin groups. Those skilled in the art appreciates that other suitable technologies may also be utilized for stapling in accordance with the present disclosure, e.g., those described in the priority applications, WO/2019/051327, WO/2020/041270, WO 2022/261257 etc., the peptide staples and technologies for preparing peptides are incorporated herein by reference.

### Example 2. Provided Technologies can Provide Improved Properties and/or Activities

[1086] Various technologies can be utilized to assess technologies of the present disclosure. For example, in some embodiments, solubility, LogD, interactions with targets, etc. of various agents such as stapled peptides were assessed using technologies described in WO 2022/261257 (e.g., those in its Examples). In some embodiments, solubility, shake flask LogD, and binding to beta-catenin were assessed. In some embodiments, an assay for assessing interactions, e.g., with beta-catenin, was fluorescence polarization as described in WO 2022/261257. In some embodiments, an assay was Nano-BRET target engagement assay that assessed beta-catenin/TCF4 engagement as described in WO 2022/261257. In some embodiments, an assay was a reporter assay as reported in Example 4 of WO 2022/261257. In some embodiments, an assay was a COLO320DM proliferation assay as reported in Example 4 of WO 2022/261257. Certain results are presented in Tables below as examples.

TABLE E1
Certain data of various compositions as examples.

| 1 | 2 | 3 | 4 | 5 | 6 | 7 | 8 | 9 |
|---|---|---|---|---|---|---|---|---|
| I-1 | A | D | | | 1899.8 | 1901.4 | 1899.3 | |
| I-2 | A | | | | 1899.8 | 1901.3 | 1899.4 | |
| I-3 | A | C | | | 1899.8 | 1901.3 | 1899.4 | |
| I-4 | A | D | | | 1899.8 | 951.3 | 1899.5 | |
| I-5 | A | D | | | 1899.8 | 1901.3 | 1899.4 | |
| I-6 | A | D | | | 1899.8 | 951.2 | 1899.3 | |
| I-7 | A | D | | | 1956.8 | 1958.4 | 1956.5 | |
| I-8 | A | D | | | 1956.8 | 1958.4 | 1956.5 | |
| I-9 | A | C | | | 1975.9 | 1977.4 | 1975.4 | |
| I-10 | A | D | | | 1975.9 | 1977.3 | 1975.4 | |
| I-11 | A | B | | | 1975.9 | 1977.4 | 1975.5 | |
| I-12 | A | C | | | 1975.9 | 1977.3 | 1975.5 | |
| I-13 | A | C | | | 1975.9 | 1977.3 | 1975.4 | |
| I-14 | A | C | | | 1975.9 | 1977.4 | 1975.5 | |
| I-15 | A | B | | | 1975.9 | 989.2 | 1975.4 | |
| I-16 | A | C | | | 1975.9 | 989.3 | 1875.5 | |
| I-17 | A | D | | | 1923.8 | 1925.5 | 1923.3 | |
| I-18 | A | | | | 1923.8 | 1925.3 | 1923.3 | |
| I-19 | A | C | | | 1999.9 | 2001.4 | 1999.3 | |
| I-20 | A | | | | 1999.9 | 2001.3 | 1999.3 | |
| I-21 | A | B | | | 2061.9 | 2063.3 | 2061.3 | |
| I-22 | A | | | | 2061.9 | 2063.4 | 2061.4 | |
| I-23 | A | C | | | 1923.8 | 1925.2 | 1923.2 | |
| I-24 | A | C | ++ | | 1999.9 | 2001.3 | 1999.4 | |
| I-25 | A | C | | | 2061.9 | 1032.2 | 2061.3 | |
| I-26 | D | | | | 1980.9 | 1982.3 | 1980.3 | |
| I-27 | C | | | | 2056.9 | 2058.3 | 2056.4 | |
| I-28 | D | | | | 2118.9 | 2120.2 | 2118.4 | |
| I-29 | A | D | | | 1980.9 | 1982.3 | 1980.3 | |
| I-30 | A | D | | | 2056.9 | 2058.5 | 2056.5 | |
| I-31 | A | D | | | 2118.9 | 2120.3 | 2118.4 | |
| I-32 | A | A | | | 1989.9 | 1992.0 | 1990.1 | |
| I-33 | A | C | | | 1989.9 | 996.6 | 1990.1 | |
| I-34 | A | C | | | 1975.9 | 1977.9 | 1976.0 | |
| I-35 | D | | | | 1975.9 | 1977.9 | 1976.1 | |
| I-36 | C | | | | 1975.9 | 1977.9 | 1975.9 | |
| I-37 | A | C | | | 1975.9 | 1977.9 | 1976.2 | |
| I-38 | A | C | | | 1975.9 | 989.6 | 1976.3 | |
| I-39 | A | D | | | 1961.8 | 1964.0 | 1961.9 | |
| I-40 | E | | | | 1961.8 | 1963.9 | 1961.7 | |
| I-41 | C | | | | 1961.8 | 1963.9 | 1961.9 | |
| I-42 | A | B | | | 2060.9 | 2063.1 | 2061.1 | |
| I-43 | A | B | | | 2060.9 | 1032.2 | 2060.9 | |
| I-44 | D | | | | 2046.9 | 2049.0 | 2046.9 | |
| I-45 | A | D | | | 2179.0 | 2181.3 | 2179.4 | |
| I-46 | A | C | | | 2131.0 | 2133.4 | 2131.5 | |
| I-47 | A | D | | | 2145.0 | 2147.3 | 2145.4 | |
| I-48 | A | D | | | 2255.0 | 2257.6 | 2255.1 | |
| I-49 | B | C | | | 2255.0 | 2257.4 | 2255.4 | |
| I-50 | B | D | | | 2207.0 | 1105.4 | 2208.2 | |
| I-51 | A | C | | | 2159.0 | 2161.7 | 2159.7 | |
| I-52 | A | D | | | 2173.0 | 2175.5 | 2173.7 | |
| I-53 | B | D | | | 2283.0 | 2285.6 | 2283.9 | |
| I-54 | B | | | | 2283.0 | 2285.7 | 2283.6 | |
| I-55 | A | B | | | 2051.9 | 2053.9 | 2052.3 | |
| I-56 | A | C | | | 2037.9 | 2039.9 | 2037.8 | |
| I-57 | A | B | | | 2122.9 | 2125.0 | 2123.1 | |
| I-58 | B | D | | | 2108.9 | 2111.1 | 2108.8 | |
| I-59 | B | D | | | 2108.9 | 2111.1 | 2109.1 | |
| I-60 | A | C | | | 2180.0 | 2182.1 | 2180.1 | |
| I-61 | A | D | | | 2165.9 | 2168.2 | 2165.9 | |
| I-62 | A | C | | | 2077.9 | 2080.1 | 2078.2 | |
| I-63 | A | C | | | 2077.9 | 2080.0 | 2078.2 | |
| I-64 | A | B | ++ | ++ | 2073.9 | 2076.1 | 2074.0 | |
| I-65 | A | B | | | 2047.9 | 2050.0 | 2048.0 | |
| I-66 | A | A | | | 2074.9 | 1038.8 | 1036.8 | |
| I-67 | A | A | + | + | 2074.9 | 2076.6 | 2074.7 | |
| I-68 | A | B | | | 2137.0 | 1069.7 | 1067.8 | |
| I-69 | A | A | + | + | 2137.0 | 2138.7 | 2136.8 | |
| I-70 | A | A | + | + | 2103.0 | 2104.6 | 2102.8 | |
| I-71 | A | B | | | 2165.0 | 2166.7 | 2164.8 | |
| I-72 | A | B | | | 2090.9 | 2092.5 | 2090.6 | |
| I-73 | A | B | | | 2152.9 | 2154.6 | 2152.7 | |
| I-74 | A | D | | | 2101.9 | 2103.5 | 2101.6 | |
| I-75 | A | D | | | 2163.9 | 2165.5 | 2163.6 | |
| I-76 | A | C | | | 2064.9 | 2066.6 | 2064.6 | A |
| I-77 | A | D | | | 2127.0 | 2128.8 | 2126.8 | A |
| I-78 | A | D | | | 2105.9 | 2107.6 | 2105.8 | A |
| I-79 | B | | | | 2168.0 | 2169.8 | 2167.9 | A |
| I-80 | A | C | | | 2059.9 | 2061.6 | 2059.8 | |
| I-81 | B | C | | | 2046.9 | 2048.5 | 2046.6 | |
| I-82 | A | C | | | 2059.9 | 2061.5 | 2059.6 | |
| I-83 | C | D | | | 2046.9 | 2048.5 | 2046.6 | |
| I-84 | A | C | | | 2075.9 | 2077.6 | 2075.7 | |
| I-85 | B | D | | | 2062.9 | 2064.5 | 2062.6 | |
| I-86 | B | D | | | 2075.9 | 2077.7 | 2075.8 | |
| I-87 | C | | | | 2062.9 | 2064.6 | 2062.7 | |
| I-88 | A | D | | | 2116.9 | 2118.8 | 2116.8 | |
| I-89 | B | D | | | 2103.9 | 2105.7 | 2103.8 | |
| I-90 | B | D | | | 2116.9 | 2118.6 | 2116.7 | |
| I-91 | C | | | | 2103.9 | 2105.7 | 2103.7 | |
| I-92 | A | | | | 2236.0 | 1119.3 | 1117.3 | |
| I-93 | C | | | | 2248.0 | 1125.6 | 1123.4 | |
| I-94 | C | | | | 2248.0 | 1125.6 | 1123.5 | |
| I-95 | B | | | | 2276.1 | 2277.5 | 2275.6 | |
| I-96 | C | | | | 2276.1 | 1140.5 | 1138.6 | |
| I-97 | A | B | | | 2149.0 | 2150.5 | 2148.6 | |
| I-98 | A | C | | | 2149.0 | 1075.8 | 1073.9 | |
| I-99 | A | D | + | | 2179.0 | 1090.8 | 2178.4 | |
| I-100 | A | | | | 2179.0 | 1090.8 | 1088.9 | |
| I-101 | A | B | | | 2205.0 | 1103.8 | 2204.4 | |
| I-102 | A | C | | | 2205.0 | 1103.8 | 2204.4 | |
| I-103 | A | C | | | 2231.0 | 1116.8 | 2230.5 | |
| I-104 | A | B | | | 2165.0 | 1083.8 | 2164.4 | |
| I-105 | A | | | | 2165.0 | 1083.8 | 1081.9 | |
| I-106 | A | B | + | | 2191.0 | 1096.8 | 2190.4 | |
| I-107 | A | | | | 2191.0 | 1097.0 | 1095.0 | |
| I-108 | A | D | | | 2221.0 | 1111.8 | 2220.5 | |
| I-109 | B | D | ++ | | 2221.0 | 1111.8 | 2220.5 | |
| I-110 | B | C | | | 2247.1 | 1124.8 | 2246.5 | |
| I-111 | B | C | | | 2247.1 | 1224.8 | 2246.5 | |
| I-112 | A | C | | | 2157.9 | 1080.3 | 1078.3 | |
| I-113 | A | D | | | 2157.0 | 1079.1 | 2156.3 | |
| I-114 | B | | | | 2157.0 | 1079.8 | 2156.3 | |
| I-115 | E | | | | 2144.0 | 1073.3 | 2143.3 | |
| I-116 | E | | | | 2144.0 | 1073.3 | 2143.3 | |
| I-117 | C | | | | 2157.0 | 2158.2 | 2156.3 | |
| I-118 | E | | | | 2144.0 | 1073.3 | 2143.3 | |
| I-119 | E | | | | 2144.0 | 1073.3 | 2143.3 | |
| I-120 | A | B | | | 2172.0 | 2173.2 | 2171.3 | |
| I-121 | A | B | ++ | | 2172.0 | 2173.2 | 2171.3 | |
| I-122 | A | D | | | 2200.0 | 2201.2 | 2199.3 | |
| I-123 | B | D | | | 2234.0 | 1118.3 | 2233.4 | |
| I-124 | A | D | | | 2186.0 | 1094.3 | 1092.3 | |
| I-125 | A | D | ++ | | 2186.0 | 1094.3 | 1092.3 | |
| I-126 | A | C | ++ | | 2172.0 | 1087.2 | 2171.3 | |
| I-127 | A | C | ++ | | 2172.0 | 1087.2 | 2171.3 | |
| I-128 | B | C | ++ | | 2200.0 | 2201.2 | 2199.4 | |
| I-129 | A | C | ++ | | 2186.0 | 2187.2 | 2185.3 | |
| I-130 | B | D | | | 2302.1 | 1152.3 | − | |
| I-131 | C | D | | | 2302.1 | 2303.4 | − | |
| I-132 | B | D | | | 2302.1 | 2303.5 | − | |
| I-133 | D | D | | | 2306.1 | 2307.5 | − | A |
| I-134 | C | D | | | 2306.1 | 2303.3 | − | A |
| I-135 | E | D | | | 2306.1 | 2307.6 | − | A |
| I-136 | A | B | | | 2252.0 | 1127.6 | 1125.6 | |
| I-137 | A | B | | | 2294.1 | 1148.6 | 1146.6 | |
| I-138 | A | B | + | + | 2266.0 | 1134.6 | 1132.6 | |
| I-139 | A | B | + | | 2264.0 | 1133.6 | 1131.6 | |
| I-140 | A | A | + | | 2278.0 | 1140.6 | 1138.6 | |
| I-141 | A | B | + | | 2292.0 | 1147.6 | 1145.5 | |
| I-142 | C | C | +++ | | 2251.0 | 1127.0 | 1125.0 | |
| I-143 | C | D | | | 2293.1 | 1148.1 | 1146.1 | |
| I-144 | A | C | ++ | | 2265.0 | 1134.1 | 1132.3 | |
| I-145 | E | | | | 2238.0 | 1120.5 | 1118.6 | |
| I-146 | E | | | | 2280.1 | 2282.1 | 2280.2 | |
| I-147 | D | | | | 2252.1 | 1127.6 | 1125.6 | |
| I-148 | C | | | | 1976.0 | 989.2 | 987.0 | |
| I-149 | C | D | | | 2045.0 | 2046.7 | 2044.6 | |
| I-150 | E | | | | 2018.0 | 2019.4 | 2017.4 | |
| I-151 | B | D | | | 1981.9 | 993.3. | 991.2. | |
| I-152 | D | | | | 2051.0 | 2011.4 | 2009.4 | |
| I-153 | E | | | | 1980.0 | 991.3. | 989.2. | A |
| I-154 | E | | | | 2049.1 | 2050.6 | 2048.4 | A |
| I-155 | E | | | | 1953.0 | 977.7 | 975.5 | A |
| I-156 | E | | | | 2022.1 | 2023.6 | 2021.5 | A |
| I-157 | E | | | | 1985.9 | 994.2. | 1985.3 | A |
| I-158 | E | | | | 2055.0 | 2056.6 | 2054.5 | A |
| I-159 | A | B | | | 2073.9 | 1038.3 | 1036.2 | |
| I-160 | A | C | | | 2046.9 | 1024.8 | 1022.9 | |
| I-161 | C | | | | 2060.9 | 1031.8 | 1029.6 | |
| I-162 | C | D | | | 2060.9 | 2062.0 | 2060.1 | |
| I-163 | A | C | +++ | | 2060.9 | 1031.7 | 2060.1 | |
| I-164 | B | D | | | 2088.0 | 1045.2 | 2087.2 | |
| I-165 | A | C | | | 2073.9 | 1038.2 | 2073.2 | |
| I-166 | B | C | | | 2046.9 | 1024.7 | 2046.1 | |
| I-167 | E | | | | 2060.9 | 1031.7 | 2060.2 | |
| I-168 | C | D | | | 2060.9 | 1031.7 | 2060.2 | |
| I-169 | B | D | | | 2060.9 | 1031.7 | 2060.2 | |
| I-170 | B | D | | | 2088.0 | 1045.2 | 2087.2 | |
| I-171 | B | D | | | 2078.0 | 1040.2 | 2077.2 | A |
| I-172 | D | | | | 2051.0 | 1026.7 | 2050.3 | A |
| I-173 | E | | | | 2065.0 | 1033.7 | 2064.2 | A |
| I-174 | E | | | | 2065.0 | 1033.7 | 2064.2 | A |
| I-175 | E | | | | 2065.0 | 1033.7 | 2064.2 | A |
| I-176 | E | | | | 2092.0 | 1047.2 | 2091.2 | A |
| I-177 | C | D | | | 2078.0 | 1040.2 | 2077.2 | A |
| I-178 | E | | | | 2051.0 | 1026.7 | 2050.2 | A |
| I-179 | E | | | | 2065.0 | 1033.7 | 2064.2 | A |
| I-180 | E | | | | 2065.0 | 1033.7 | 2064.2 | A |
| I-181 | E | | | | 2065.0 | 1033.7 | 2064.2 | A |
| I-182 | E | | | | 2092.0 | 1047.2 | 1887.9 | A |
| I-183 | A | C | ++ | | 2074.9 | 1038.7 | 1036.8 | |
| I-184 | A | | | | 2137.0 | 1069.7 | 1067.7 | |
| I-185 | A | | | | 2074.9 | 1038.7 | 1036.8 | |
| I-186 | A | | | | 2137.0 | 1069.7 | 1067.6 | |
| I-187 | A | C | +++ | | 2117.0 | 1059.7 | 1057.6 | |
| I-188 | A | C | | | 2179.0 | 1090.7 | 1088.8 | |
| I-189 | A | C | | | 2179.0 | 1090.7 | 1088.7 | |
| I-190 | A | | | | 2103.0 | 1052.7 | 1050.8 | |
| I-191 | B | C | | | 2165.0 | 1083.7 | 1081.7 | |
| I-192 | A | | | | 2165.0 | 1083.7 | 1081.7 | |
| I-193 | A | C | | | 2152.9 | 2175.8 | 2152.0 | |
| I-194 | A | A | | | 2152.9 | 2175.8 | 2152.0 | |
| I-195 | A | | | | 2184.0 | 2184.9 | 2183.1 | |
| I-196 | B | C | | | 2137.0 | 1069.6 | 2136.1 | |
| I-197 | A | B | | | 2137.0 | 2159.8 | 2136.0 | |
| I-198 | A | C | | | 2074.9 | 2097.8 | 2073.9 | |
| I-199 | A | C | | | 2060.9 | 2083.8 | 2060.0 | |
| I-200 | B | D | | | 2046.9 | 2069.8 | 2046.1 | |
| I-201 | B | C | | | 2074.0 | 2096.8 | 2073.0 | |
| I-202 | A | D | | | 2083.0 | 2084.1 | 2082.0 | |
| I-203 | E | D | | | 2109.0 | 2131.9 | 2108.1 | |
| I-204 | A | C | | | 2204.9 | 1103.6 | 1101.7 | |
| I-205 | A | C | | | 2204.9 | 2227.8 | 2204.0 | |
| I-206 | A | | | | 2204.9 | 2227.8 | 2204.0 | |
| I-207 | A | B | | | 2204.9 | 2227.8 | 2204.0 | |
| I-208 | A | C | | | 2154.9 | 2177.8 | 2154.0 | |
| I-209 | E | D | | | 2045.0 | 2067.8 | 2044.0 | |
| I-210 | B | C | | | 2032.9 | 2055.8 | 2032.0 | |
| I-211 | C | D | | | 2132.0 | 2154.9 | 2131.1 | |
| I-212 | A | C | | | 2059.9 | 2082.8 | 2059.0 | |
| I-213 | B | C | | | 2016.9 | 2039.8 | 2015.9 | |
| I-214 | B | D | | | 2102.0 | 2103.2 | 2101.1 | |
| I-215 | A | | | | 2074.9 | 1038.7 | 1036.7 | |
| I-216 | B | C | | | 2046.9 | 1024.7 | 1022.6 | |
| I-217 | E | D | | | 2123.0 | 1062.7 | 1060.8 | |
| I-218 | B | C | | | 2136.0 | 1069.2 | 1067.2 | |
| I-219 | C | | | | 2059.0 | 1030.7 | 1028.7 | |
| I-220 | C | D | | | 2093.0 | 1047.7 | 1045.5 | |
| I-221 | C | D | | | 2074.0 | 2075.2 | 2073.2 | |
| I-222 | E | D | | | 2059.0 | 1030.7 | 1028.6 | |
| I-223 | A | B | | | 2211.0 | 2212.2 | 2210.2 | |
| I-224 | A | D | | | 2324.1 | 2325.3 | 2323.2 | |
| I-225 | A | | | | 2308.1 | 2309.3 | 2307.2 | |
| I-226 | A | B | | | 2165.0 | 1083.7 | 1081.8 | |
| I-227 | A | B | | | 2252.0 | 2253.1 | 2251.2 | |
| I-228 | A | C | | | 2278.1 | 2279.3 | 2277.3 | |
| I-229 | A | D | | | 2365.1 | 2366.4 | 2364.3 | |
| I-230 | A | | | | 2224.0 | 1113.2 | 1111.2 | |
| I-231 | A | D | | | 2250.0 | 2251.1 | 2049.2 | |
| I-232 | A | D | | | 2337.1 | 2338.1 | 2336.2 | |
| I-233 | A | D | | | 2010.9 | 1006.6 | 2009.9 | A |
| I-234 | A | D | | | 2024.9 | 1013.6 | 2023.9 | A |
| I-235 | A | D | | | 2038.9 | 1020.6 | 2038.1 | A |
| I-236 | A | D | | | 2010.9 | 1006.6 | 2009.9 | A |
| I-237 | A | D | | +++ | 1996.9 | 999.6. | 1995.8 | A |
| I-238 | A | D | | | 2010.9 | 1006.6 | 2009.9 | A |
| I-239 | C | D | | | 2045.9 | 2046.8 | 2044.8 | A |
| I-240 | B | D | | | 2059.9 | 1031.1 | 2058.9 | A |
| I-241 | C | D | | | 2073.9 | 1038.1 | 2073.2 | A |
| I-242 | C | D | | | 2045.9 | 1024.1 | 2044.8 | A |
| I-243 | B | D | | | 2031.9 | 1017.1 | 2030.8 | A |
| I-244 | B | D | | | 2045.9 | 1024.1 | 2045.2 | A |
| I-245 | A | B | | + | 2060.9 | 1031.6 | 2059.9 | |
| I-246 | A | B | | | 2060.9 | 1031.6 | 2060.2 | |
| I-247 | A | B | | | 2060.9 | 1031.6 | 2060.2 | |
| I-248 | A | B | | | 2046.9 | 1024.6 | 2045.9 | |
| I-249 | A | C | | | 2094.9 | 1048.6 | 2093.9 | |
| I-250 | A | C | | | 2100.9 | 1051.6 | 2100.2 | |
| I-251 | A | B | | | 2086.9 | 1044.6 | 2085.9 | |
| I-252 | A | C | | | 2058.9 | 1030.6 | 2057.9 | |
| I-253 | A | A | | + | 2086.9 | 1044.6 | 2086.2 | |
| I-254 | A | C | | | 2184.8 | 1093.5 | 2183.9 | |
| I-255 | A | C | | | 2074.9 | 1038.6 | 2073.9 | |
| I-256 | A | C | | | 2086.9 | 1044.6 | 2086.2 | |
| I-257 | A | C | | | 2149.0 | 1075.6 | 2147.9 | |
| I-258 | A | C | | | 2086.9 | 1044.6 | 2085.9 | |
| I-259 | B | C | | | 2149.0 | 1075.6 | 2147.9 | |
| I-260 | A | | | | 2100.9 | 1082.5 | 2161.9 | |
| I-261 | A | | | | 2163.0 | 1051.6 | 2100.2 | |
| I-262 | A | B | + | + | 2114.9 | 1058.6 | 2114.2 | |
| I-263 | A | C | | | 2114.9 | 1058.6 | 2113.9 | |
| I-264 | A | | | | 2100.9 | 1051.6 | 2099.9 | |
| I-265 | A | C | | | 2100.9 | 1051.6 | 2099.9 | |
| I-266 | C | D | | | 1992.9 | 1996.6 | 1994.8 | |
| I-267 | C | | | | 1992.9 | 1993.9 | 1992.0 | |
| I-268 | B | D | | | 2006.9 | 1005.7 | 2008.3 | |
| I-269 | B | D | | | 2006.9 | 1004.6 | 1002.6 | |
| I-270 | A | C | | | 2021.0 | 1011.6 | 1009.7 | |
| I-271 | A | C | | | 2035.0 | 1019.8 | 2036.6 | |
| I-272 | A | B | | | 2035.0 | 1018.6 | 1016.8 | |
| I-273 | B | D | | | 2035.0 | 1019.8 | 2036.8 | |
| I-274 | B | D | | | 2035.0 | 1018.6 | 1016.6 | |
| I-275 | A | C | | | 2049.0 | 1026.7 | 2050.4 | |
| I-276 | A | C | | | 2049.0 | 1025.6 | 1023.7 | |
| I-277 | B | D | | | 2049.0 | 1026.8 | 2050.4 | |
| I-278 | B | D | | | 2049.0 | 1025.7 | 1023.8 | |
| I-279 | A | C | | | 2069.0 | 1036.8 | 2070.8 | |
| I-280 | A | B | | | 2069.0 | 2070.1 | 2068.2 | |
| I-281 | A | C | | | 2033.0 | 1018.7 | 2034.4 | |
| I-282 | A | C | | | 2033.0 | 1017.6 | 1015.7 | |
| I-283 | A | C | | | 2047.0 | 1024.6 | 1022.7 | |
| I-284 | A | C | | | 2061.0 | 1031.6 | 1029.4 | |
| I-285 | A | C | | | 2075.0 | 1038.6 | 1036.7 | |
| I-286 | A | | | | 2151.0 | 2152.1 | 2150.2 | |
| I-287 | B | D | | | 2151.0 | 1076.7 | 2150.0 | |
| I-288 | A | B | | | 2151.0 | 2151.9 | 2150.0 | |
| I-289 | A | C | | | 2151.0 | 1076.6 | 1074.6 | |
| I-290 | B | | | | 2151.0 | 1076.7 | 2150.3 | |
| I-291 | E | D | ++ | | 2165.0 | 1083.7 | 2164.0 | |
| I-292 | A | C | | | 2058.9 | 2060.0 | 2058.0 | |
| I-293 | A | B | | | 2099.0 | 2099.9 | 2098.1 | |
| I-294 | A | A | | + | 2083.0 | 2083.9 | 2082.1 | |
| I-295 | A | A | | | 2146.9 | 1075.0 | 1073.1 | |
| I-296 | A | B | | | 2102.9 | 1052.8 | 1050.9 | |
| I-297 | A | B | | | 2094.0 | 2094.9 | 2093.1 | |
| I-298 | A | A | | | 2113.9 | 2114.9 | 2113.0 | |
| I-299 | A | B | | ++ | 2070.0 | 2071.2 | 2069.1 | |
| I-300 | A | C | | +++ | 2070.0 | 2071.2 | 2069.0 | |
| I-301 | A | D | | +++ | 2070.0 | 2071.1 | 2069.1 | |
| I-302 | A | D | | | 2059.0 | 2060.0 | 2058.0 | |
| I-303 | A | D | | | 2843.3 | 1422.9 | 1420.8 | |
| I-304 | A | C | | + | 2018.9 | 1010.6 | 2017.9 | |
| I-305 | A | C | | | 2110.9 | 1056.6 | 2110.0 | |
| I-306 | A | D | | | 2133.9 | 1068.1 | 2133.0 | |
| I-307 | A | D | | | 2034.9 | 1018.6 | 2033.9 | |
| I-308 | A | | | | 2032.9 | 2034.1 | 2032.1 | |
| I-309 | A | | | | 2080.9 | 2082.1 | 2080.1 | |
| I-310 | A | B | | | 2170.9 | 1086.6 | 2170.1 | |
| I-311 | A | B | | | 2117.0 | 1059.6 | 2116.0 | |
| I-312 | A | B | | | 2072.9 | 1037.6 | 2072.0 | |
| I-313 | A | D | | +++ | 2131.9 | 2133.1 | 2131.0 | |
| I-314 | A | C | | | 2165.9 | 2167.2 | 2165.3 | |
| I-315 | A | C | | | 2121.0 | 2122.1 | 2120.3 | |
| I-316 | B | D | | | 2094.0 | 2095.2 | 2093.3 | |
| I-317 | E | | | | 2108.0 | 2109.1 | 2107.3 | |
| I-318 | A | C | | | 2121.0 | 2122.1 | 2120.3 | |
| I-319 | A | D | | | 2234.0 | 2235.3 | 2233.4 | |
| I-320 | B | D | | | 2207.0 | 2208.3 | 2206.4 | |
| I-321 | E | | | | 2221.0 | 2222.2 | 2220.3 | |
| I-322 | A | C | | | 2234.0 | 2235.3 | 2233.4 | |
| I-323 | A | B | | | 2187.0 | 2188.2 | 2186.1 | |
| I-324 | A | D | | | 2160.0 | 2161.1 | 2159.3 | |
| I-325 | C | | | | 2174.0 | 2175.1 | 2173.2 | |
| I-326 | A | C | | | 2187.0 | 2188.2 | 2186.3 | |
| I-327 | A | | | | 2148.9 | 2150.6 | 2148.7 | |
| I-328 | A | B | | | 2086.9 | 2088.6 | 2086.8 | |
| I-329 | A | A | | | 2080.9 | 2082.6 | 2080.8 | |
| I-330 | A | C | | | 2109.0 | 1055.6 | 1053.6 | |
| I-331 | A | | | | 2158.9 | 2160.8 | 2158.9 | |
| I-332 | A | C | | | 2096.9 | 2098.7 | 2096.9 | |
| I-333 | A | | | | 2090.9 | 1047.0 | 1044.9 | |
| I-334 | A | B | | | 2119.0 | 1060.6 | 1058.6 | |
| I-335 | A | A | + | + | 2084.9 | 2085.9 | 2084.0 | |
| I-336 | A | B | ++ | | 2084.9 | 1043.6 | 2084.1 | |
| I-337 | A | B | + | | 2070.9 | 2071.9 | 2070.0 | |
| I-338 | A | C | + | | 2070.9 | 1036.6 | 2070.0 | |
| I-339 | C | D | | | 2249.8 | 2250.7 | 2248.9 | |
| I-340 | C | | | | 2397.8 | 2398.7 | 2396.8 | |
| I-341 | C | D | | | 2397.8 | 2398.8 | 2396.9 | |
| I-342 | A | B | + | | 2204.0 | 1103.1 | 1101.2 | |
| I-343 | A | B | | | 2275.0 | 1138.6 | 1136.5 | |
| I-344 | A | D | | | 2113.0 | 2113.9 | 2112.1 | |
| I-345 | A | C | | | 2118.9 | 2119.9 | 2118.1 | |
| I-346 | B | | | | 2156.9 | 2157.9 | 2156.0 | |
| I-347 | B | D | | | 2357.0 | 1179.6 | 1177.6 | |
| I-348 | A | | | | 2204.9 | 2206.0 | 2204.1 | |
| I-349 | A | D | | | 2113.9 | 2114.8 | 2113.0 | |
| I-350 | A | D | | | 2119.9 | 2120.9 | 2119.0 | |
| I-351 | B | D | | | 2157.9 | 2158.8 | 2156.9 | |
| I-352 | B | D | | | 2358.0 | 2358.9 | 2357.0 | |
| I-353 | A | | | | 2052.9 | 1027.6 | 1025.6 | |
| I-354 | B | D | | | 2067.0 | 2067.9 | 2066.1 | |
| I-355 | A | C | | | 2130.9 | 1066.6 | 1064.7 | |
| I-356 | A | D | | | 2124.9 | 2125.9 | 2124.1 | |
| I-357 | A | C | | | 2124.9 | 1063.7 | 1061.9 | |
| I-358 | A | B | | | 2090.9 | 2091.9 | 2090.1 | |
| I-359 | A | C | | | 2113.9 | 2114.9 | 2113.0 | |
| I-360 | D | | | | 2040.9 | 2041.9 | 2040.1 | |
| I-361 | E | | | | 2040.9 | 1021.6 | 1019.8 | |
| I-362 | A | | | | 2040.9 | 1021.6 | 1019.5 | |
| I-363 | B | D | | | 2014.9 | 2015.9 | 2014.0 | |
| I-364 | A | A | | | 2080.9 | 2082.0 | 2080.3 | |
| I-365 | A | B | | | 2080.9 | 2081.9 | 2080.0 | |
| I-366 | E | | | | 2067.0 | 1034.6 | 1032.7 | |
| I-367 | B | | | | 2028.9 | 2029.9 | 2028.0 | |
| I-368 | C | | | | 2065.9 | 2067.0 | 2065.1 | |
| I-369 | A | C | | | 2142.9 | 1072.6 | 1070.6 | |
| I-370 | E | | | | 2028.9 | 2029.9 | 2028.0 | |
| I-371 | C | | | | 2064.9 | 2066.1 | 2064.0 | |
| I-372 | E | | | | 2026.9 | 2027.9 | 2026.0 | |
| I-373 | E | | | | 2041.9 | 2042.9 | 2041.0 | |
| I-374 | C | | | | 2055.9 | 2056.9 | 2055.1 | |
| I-375 | A | C | | + | 2205.9 | 1104.2 | 1102.2 | |
| I-376 | C | D | | | 2205.9 | 1104.2 | 1102.1 | |
| I-377 | B | C | | | 2205.9 | 1104.1 | 1102.1 | |
| I-378 | A | B | | | 2188.0 | 1095.1 | 1093.2 | |
| I-379 | A | B | | | 2146.0 | 1074.1 | 1072.3 | |
| I-380 | A | D | | | 2152.9 | 1077.6 | 1075.7 | |
| I-381 | A | B | | | 2160.0 | 1081.1 | 1079.3 | |
| I-382 | A | B | | | 2100.9 | 1051.6 | 1050.0 | |
| I-383 | A | A | | | 2100.9 | 1051.6 | 1049.6 | |
| I-384 | A | | | | 2115.9 | 2117.2 | 2115.1 | |
| I-385 | A | D | | | 2115.9 | 2117.1 | 2115.1 | |
| I-386 | A | A | | +++ | 2136.9 | 1069.6 | 1067.6 | |
| I-387 | A | C | | | 2126.9 | 2128.1 | 2126.1 | |
| I-388 | A | A | | | 2088.9 | 1045.6 | 1043.6 | |
| I-389 | A | B | | | 2076.9 | 1039.6 | 1037.7 | |
| I-390 | A | B | | | 2076.9 | 1039.6 | 1037.7 | |
| I-391 | A | C | | | 2117.9 | 1060.1 | 1058.2 | |
| I-392 | A | C | | | 2117.9 | 1060.1 | 1058.2 | |
| I-393 | A | C | | | 2103.9 | 1053.1 | 1051.2 | |
| I-394 | A | | | | 2103.9 | 2104.7 | 2102.9 | |
| I-395 | E | | | | 2024.9 | 2025.9 | 2024.1 | |
| I-396 | A | B | | | 2103.0 | 1052.6 | 2102.2 | |
| I-397 | A | B | | | 2088.9 | 2111.9 | 2088.1 | |
| I-398 | A | B | | | 2104.9 | 2106.0 | 2104.1 | |
| I-399 | A | A | | | 2190.0 | 1096.0 | 2189.0 | |
| I-400 | A | B | | | 2176.0 | 1089.0 | 2175.0 | |
| I-401 | A | A | | | 2192.0 | 2192.8 | 2191.0 | |
| I-402 | A | B | | | 2174.0 | 2197.0 | 2173.2 | |
| I-403 | A | | | | 2174.0 | 1088.1 | 2173.0 | |
| I-404 | A | A | | | 2160.0 | 2182.8 | 2159.0 | |
| I-405 | A | A | | | 2160.0 | 2182.8 | 2159.0 | |
| I-406 | A | A | | | 2176.0 | 1089.1 | 2075.1 | |
| I-407 | A | B | | | 2188.0 | 2210.9 | 2187.0 | |
| I-408 | A | A | | | 2188.0 | 2210.8 | 2187.0 | |
| I-409 | A | A | | | 2174.0 | 2196.8 | 2173.0 | |
| I-410 | A | | | | 2174.0 | 2197.1 | 2173.3 | |
| I-411 | A | B | | | 2190.0 | 2190.8 | 2188.8 | |
| I-412 | A | A | | | 2190.0 | 2213.1 | 2189.3 | |
| I-413 | A | A | | | 2112.9 | 1057.6 | 2112.0 | |
| I-414 | A | A | | | 2127.0 | 2127.8 | 2126.0 | |
| I-415 | A | A | | | 2114.9 | 2115.8 | 2113.9 | |
| I-416 | A | A | | | 2171.9 | 2172.8 | 2171.0 | |
| I-417 | A | B | | | 2200.0 | 1101.1 | 2199.0 | |
| I-418 | A | B | | | 2079.0 | 2079.8 | 2077.9 | |
| I-419 | A | | | | 2093.0 | 2094.1 | 2092.1 | |
| I-420 | A | B | | | 2093.0 | 2093.8 | 2091.9 | |
| I-421 | A | D | | | 2070.9 | 2071.9 | 2070.0 | |
| I-422 | A | D | | | 2064.9 | 2065.8 | 2063.9 | |
| I-423 | A | C | | | 2084.9 | 2085.8 | 2083.9 | |
| I-424 | A | C | | | 2079.0 | 2079.9 | 2078.0 | |
| I-425 | B | D | | | 2008.9 | 1005.5 | 1003.6 | A |
| I-426 | A | D | | | 2022.9 | 2024.0 | 2022.1 | A |
| I-427 | A | D | | | 2004.8 | 1003.5 | 1001.6 | |
| I-428 | A | D | | | 2006.9 | 2007.8 | 2006.0 | B |
| I-429 | A | D | | | 2018.9 | 1010.5 | 1008.7 | |
| I-430 | B | D | | | 2020.9 | 2022.3 | 2020.4 | |
| I-431 | A | D | | | 2020.9 | 2022.1 | 2020.2 | B |
| I-432 | A | D | | | 2117.0 | 2118.8 | 2116.9 | |
| I-433 | A | C | | | 2117.0 | 1059.8 | 1057.9 | |
| I-434 | A | D | | | 2103.0 | 1052.7 | 1050.9 | |
| I-435 | A | D | | | 2090.9 | 1046.7 | 1044.8 | |
| I-436 | A | C | | | 2090.9 | 2092.0 | 2090.2 | |
| I-437 | A | D | | | 2090.9 | 1046.7 | 1044.9 | |
| I-438 | A | D | | | 2151.0 | 1076.7 | 1074.9 | |
| I-439 | A | D | | | 2088.9 | 1045.8 | 1043.9 | |
| I-440 | A | D | | | 2086.9 | 1044.7 | 1042.8 | |
| I-441 | A | D | | | 2074.9 | 1038.7 | 1036.9 | |
| I-442 | B | D | | | 2074.9 | 1038.7 | 1036.7 | |
| I-443 | A | D | | | 2072.9 | 1037.7 | 1035.8 | |
| I-444 | A | C | | | 2090.9 | 1046.9 | 1044.9 | |
| I-445 | A | C | | | 2104.9 | 1053.7 | 1051.8 | |
| I-446 | A | D | | | 2104.9 | 2106.3 | 2104.5 | |
| I-447 | A | D | | | 2103.0 | 1052.8 | 1050.8 | |
| I-448 | A | D | | | 2103.0 | 1052.8 | 1051.0 | |
| I-449 | A | D | | | 2117.0 | 1059.8 | 1057.9 | |
| I-450 | A | D | | | 2117.0 | 1059.8 | 1057.9 | |
| I-451 | A | D | | | 2131.9 | 1067.2 | 1065.4 | |
| I-452 | A | D | | | 2131.9 | 1067.2 | 1065.3 | |
| I-453 | A | D | | | 2202.0 | 1102.3 | 1100.4 | |
| I-454 | A | D | | | 2132.0 | 2133.5 | 2131.5 | |
| I-455 | A | D | | | 2132.0 | 2133.6 | 2131.5 | |
| I-456 | A | D | | | 2151.0 | 1076.8 | 1074.8 | |
| I-457 | A | C | | | 2151.0 | 1076.7 | 1074.8 | |
| I-458 | A | B | | | 2074.9 | 1038.7 | 2074.3 | |
| I-459 | A | | | | 2074.9 | 2098.0 | 2074.2 | |
| I-460 | A | | | | 2162.0 | 2185.1 | 2161.3 | |
| I-461 | A | C | | | 2162.0 | 1082.3 | 2161.5 | |
| I-462 | A | C | | | 2117.0 | 2140.2 | 2116.3 | |
| I-463 | A | | | | 2204.0 | 2227.1 | 2203.4 | |
| I-464 | A | B | | | 2275.0 | 2298.3 | 2274.7 | |
| I-465 | A | B | | | 2317.1 | 2340.3 | 2316.5 | |
| I-466 | A | | | | 2317.1 | 2340.3 | 2316.5 | |
| I-467 | A | B | | | 2317.1 | 1159.8 | 2316.6 | |
| I-468 | A | C | | | 2317.1 | 1095.3 | 1093.4 | |
| I-469 | B | D | | | 2155.9 | 1070.0 | 1068.1 | |
| I-470 | E | D | | | 2103.0 | 1052.8 | 1050.8 | |
| I-471 | A | D | | | 2082.9 | 2083.7 | 2081.8 | |
| I-472 | A | B | | | 2114.9 | 1059.1 | 2115.3 | |
| I-473 | A | C | | | 2046.9 | 2048.8 | 2047.1 | |
| I-474 | A | C | | | 2046.9 | 1025.1 | 1023.3 | |
| I-475 | A | C | | | 2072.9 | 1037.9 | 2073.1 | |
| I-476 | A | C | | | 2072.9 | 1038.1 | 2073.2 | |
| I-477 | A | C | | | 2096.9 | 2098.7 | 2096.9 | |
| I-478 | A | B | | | 2086.9 | 2088.8 | 2086.8 | |
| I-479 | A | C | | | 2046.9 | 1024.9 | 2047.6 | |
| I-480 | A | D | | | 2046.9 | 1025.1 | 1023.1 | |
| I-481 | A | | | | 2130.9 | 1067.1 | 2131.1 | |
| I-482 | A | | | | 2130.9 | 1067.1 | 1065.1 | |
| I-483 | A | C | | | 2063.0 | 2064.2 | 2062.2 | |
| I-484 | A | D | | | 2063.0 | 2064.2 | 2062.2 | |
| I-485 | A | C | | | 2069.0 | 2070.2 | 2068.1 | |
| I-486 | A | | | | 2069.0 | 2070.2 | 2068.1 | |
| I-487 | A | C | | | 2097.0 | 1049.8 | 2096.6 | |
| I-488 | A | | | | 2097.0 | 1049.8 | 2096.7 | |
| I-489 | A | | | | 2029.0 | 2030.2 | 2028.2 | |
| I-490 | B | | | | 2029.0 | 1015.6 | 2028.2 | |
| I-491 | B | | | | 2055.0 | 1028.6 | 2054.2 | |
| I-492 | B | | | | 2055.0 | 1028.6 | 2054.2 | |
| I-493 | A | C | | | 2303.0 | 1152.9 | 1151.1 | |
| I-494 | A | C | | | 2317.0 | 1159.9 | 1157.9 | |
| I-495 | A | B | | | 2317.0 | 1159.9 | 1158.1 | |
| I-496 | A | C | | | 2275.0 | 1138.9 | 1137.1 | |
| I-497 | A | B | | | 2275.0 | 1138.9 | 1137.1 | |
| I-498 | A | B | | | 2289.1 | 1145.9 | 1144.1 | |
| I-499 | A | C | | | 2289.1 | 1145.9 | 1143.9 | |
| I-500 | A | B | | | 2289.1 | 1145.9 | 1144.1 | |
| I-501 | A | C | | | 2289.1 | 1145.9 | 2287.9 | |
| I-502 | A | C | | | 2345.1 | 1173.9 | 1172.1 | |
| I-503 | A | C | | | 2345.1 | 1174.1 | 1171.9 | |
| I-504 | A | C | | | 2359.1 | 1180.9 | 1179.1 | |
| I-505 | A | C | | | 2359.1 | 1181.1 | 1178.9 | |
| I-506 | A | C | | | 2289.0 | 1145.9 | 1144.1 | |
| I-507 | A | B | | | 2303.0 | 1152.9 | 1151.1 | |
| I-508 | A | B | | | 2275.0 | 1138.9 | 1137.1 | |
| I-509 | A | B | | | 2275.0 | 1138.9 | 1137.1 | |
| I-510 | A | B | | | 2275.0 | 1138.9 | 1136.9 | |
| I-511 | A | B | | | 2275.0 | 1139.1 | 1137.1 | |
| I-512 | A | C | | | 2331.1 | 1166.9 | 1165.1 | |
| I-513 | A | C | | | 2331.1 | 1166.9 | 1164.9 | |
| I-514 | A | C | | | 2132.9 | 2133.5 | 2131.7 | |
| I-515 | A | D | | | 2146.9 | 1074.4 | 1072.5 | |
| I-516 | A | C | | | 2161.0 | 1081.4 | 1079.4 | |
| I-517 | A | D | | | 2781.3 | 1392.1 | 1390.2 | |
| I-518 | E | | | | 2809.3 | 1406.2 | 1404.2 | |
| I-519 | A | D | | | 2137.9 | 2139.3 | 2137.4 | |
| I-520 | A | D | | | 2151.9 | 2153.3 | 2151.4 | |
| I-521 | A | | | | 2118.9 | 2121.1 | 2119.0 | |
| I-522 | C | | | | 2104.9 | 2107.1 | 2105.1 | |
| I-523 | A | | | | 2132.9 | 2135.1 | 2133.1 | |
| I-524 | B | | | | 2118.9 | 2121.1 | 2118.9 | |
| I-525 | A | | | | 2146.9 | 2149.2 | 2146.9 | |
| I-526 | C | | | | 2133.0 | 2135.1 | 2133.2 | |
| I-527 | A | | | | 2117.0 | 2119.2 | 2117.1 | |
| I-528 | A | | | | 2117.0 | 2119.0 | 2117.0 | |
| I-529 | A | | | | 2151.0 | 2153.1 | 2150.8 | |
| I-530 | A | | | | 2165.0 | 2167.2 | 2165.1 | |
| I-531 | A | | | | 2129.0 | 2131.2 | 2129.1 | |
| I-532 | A | | | | 2129.0 | 2131.0 | 2129.1 | |
| I-533 | A | | | | 2181.0 | 2183.1 | 2180.6 | |
| I-534 | A | | | | 2174.0 | 2176.0 | 2174.0 | |
| I-535 | B | | | | 2021.0 | 2022.3 | 2020.5 | |
| I-536 | B | | | | 2035.0 | 2036.5 | 2034.6 | |
| I-537 | A | | | | 2061.0 | 1031.8 | 1029.8 | |
| I-538 | A | | | | 2049.0 | 2050.4 | 2048.5 | |
| I-539 | A | | | | 2049.0 | 2050.4 | 2048.6 | |
| I-540 | C | | | | 2091.0 | 2092.5 | 2090.6 | |
| I-541 | A | | | | 2074.9 | 2076.4 | 2074.6 | |
| I-542 | A | | | | 2112.0 | 2113.3 | 2111.5 | |
| I-543 | B | | | | 2088.9 | 1045.8 | 1043.9 | |
| I-544 | C | | | | 2088.9 | 1045.8 | 1043.8 | |
| I-545 | C | D | | | 2103.0 | 2104.5 | 2102.5 | |
| I-546 | C | | | | 2103.0 | 1052.8 | 1050.9 | |
| I-547 | A | D | | | 2088.9 | 2090.4 | 2088.2 | |
| I-548 | C | D | | | 2103.0 | 2104.4 | 2102.5 | |
| I-549 | E | D | | | 2117.0 | 2118.4 | 2116.6 | |
| I-550 | E | D | | | 2117.0 | 2118.4 | 2116.6 | |
| I-551 | E | D | | | 2131.0 | 2132.5 | 2130.6 | |
| I-552 | E | | | | 2040.9 | 2042.4 | 2040.5 | |
| I-553 | E | D | | | 2055.0 | 2056.6 | 2054.7 | |
| I-554 | E | D | | | 2026.9 | 2028.4 | 2026.6 | |
| I-555 | E | D | | | 2040.9 | 2042.3 | 2040.5 | |
| I-556 | E | D | | | 2069.0 | 2070.5 | 2068.6 | |
| I-557 | A | | | | 2074.9 | 2077.1 | 2075.0 | |
| I-558 | A | | | | 2060.9 | 2063.0 | 2060.9 | |
| I-559 | A | | | | 2046.9 | 2049.0 | 2047.2 | |
| I-560 | A | | | | 2074.9 | 2077.1 | 2074.8 | |
| I-561 | A | | | | 2088.9 | 2091.1 | 2089.1 | |
| I-562 | B | D | | | 2127.9 | 2129.1 | 2127.2 | A |
| I-563 | A | D | | | 2141.9 | 2143.0 | 2141.2 | A |
| I-564 | B | D | | | 2136.0 | 1069.2 | 1067.3 | A |
| I-565 | A | D | | | 2162.0 | 2163.1 | 2161.3 | A |
| I-566 | B | | | | 2193.9 | 1198.3 | 1196.3 | |
| I-567 | B | | | | 2219.9 | 1111.4 | 1109.3 | |
| I-568 | A | | | | 2092.9 | 2095.1 | 2093.1 | |
| I-569 | A | | | | 2092.9 | 2094.8 | 2092.6 | |
| I-570 | A | | | | 2108.9 | 2111.5 | 2110.0 | |
| I-571 | A | | | | 2108.9 | 2111.8 | 2109.9 | |
| I-572 | A | | | | 2152.8 | 2156.1 | 2153.8 | |
| I-573 | A | | | | 2152.8 | 2155.9 | 2153.7 | |
| I-574 | A | | | | 2092.9 | 2095.0 | 2092.8 | |
| I-575 | A | | | | 2092.9 | 2094.9 | 2092.6 | |
| I-576 | A | | | | 2108.9 | 2111.5 | 2110.0 | |
| I-577 | A | | | | 2108.9 | 1056.5 | 1054.8 | |
| I-578 | A | | | | 2152.8 | 2156.0 | 2153.8 | |
| I-579 | A | | | | 2152.8 | 2155.8 | 2154.4 | |
| I-580 | A | | | | 2092.9 | 2095.2 | 2093.3 | |
| I-581 | A | | | | 2092.9 | 2095.0 | 2093.2 | |
| I-582 | A | | | | 2104.9 | 1054.2 | 1052.4 | |
| I-583 | A | | | | 2104.9 | 2106.9 | 2104.8 | |
| I-584 | A | | | | 2099.9 | 2101.9 | 2100.1 | |
| I-585 | A | | | | 2099.9 | 2101.9 | 2099.8 | |
| I-586 | A | | | | 2099.9 | 2101.9 | 2099.8 | |
| I-587 | A | | | | 2099.9 | 2101.9 | 2100.0 | |
| I-588 | A | | | | 2088.9 | 2091.1 | 2088.8 | |
| I-589 | A | | | | 2088.9 | 2090.9 | 2089.0 | |
| I-590 | A | | | | 2088.9 | 2091.1 | 2089.6 | |
| I-591 | A | | | | 2088.9 | 2091.1 | 2088.8 | |
| I-592 | E | | | | 2086.9 | 2088.8 | 2087.1 | |
| I-593 | E | | | | 2086.9 | 2088.9 | 2087.0 | |
| I-594 | E | | | | 2117.0 | 2119.2 | 2117.2 | |
| I-595 | E | | | | 2117.0 | 2119.0 | 2117.1 | |
| I-596 | E | | | | 2117.0 | 2119.1 | 2116.8 | |
| I-597 | E | | | | 2117.0 | 2119.1 | 2117.0 | |
| I-598 | E | | | | 2117.0 | 2119.2 | 2117.3 | |
| I-599 | E | | | | 2117.0 | 2119.2 | 2116.9 | |
| I-600 | E | | | | 2117.0 | 2119.2 | 2117.1 | |
| I-601 | E | | | | 2117.0 | 2119.0 | 2117.0 | |
| I-602 | E | | | | 2117.0 | 2119.1 | 2116.9 | |
| I-603 | E | | | | 2117.0 | 2119.0 | 2117.0 | |
| I-604 | E | | | | 2117.0 | 2119.1 | 2116.9 | |
| I-605 | E | | | | 2117.0 | 2119.0 | 2117.2 | |
| I-606 | E | | | | 2186.0 | 2188.1 | 2186.2 | |
| I-607 | A | | | | 2158.0 | 2160.2 | 2158.1 | |

Structural information and compositions of stapled peptides are described in Table E2.
1. Compound ID
2. beta-Catenin FP IC50 (nM): A ≤ 50 nM; 50 nM < B ≤ 200 nM; 200 nM < C ≤ 750 nM; 750 nM < D ≤ 1000 nM; E > 1000 nM
3. NanoBRET Abs IC50 (uM): A ≤ 1.5 uM; 1.5 uM < B ≤ 3.0 uM; 3.0 uM < C ≤ 10.0 uM; D > 10.0 uM
4. DLD1 4% Abs IC50 (uM): “+” ≤ 1.0 uM; 1.0 uM < “++” ≤ 5.0 uM; “+++” > 5.0 uM
5. COLO320DM Proliferation Abs IC50 (uM): “+” ≤ 10.0 uM; 10.0 uM < “++” ≤ 20.0 uM; “+++” > 20.0 uM
6. Calculated Mass
7. Found m/z (positive mode)
8. Found m/z (negative mode)
9. C═C double bond (e.g., —CH═CH—) reduction to single bond (e.g., —CH₂—CH₂—). A: —CH═CH— in each staple reduced to —CH₂—CH₂—; B: —CH═CH— in C-terminal side staple reduced to —CH₂—CH₂— (see, e.g., see preparation of I-428 and I-432 as examples)

[1087] Table E2. Certain peptides and compositions thereof as examples. Peptides are stapled unless indicated otherwise (among other things, the present disclosure also provides unstapled versions of such peptides, optionally protected with one or more protection group (e.g., protection of N-terminus, C-terminus, side chains, etc.), and intermediates thereof). As appreciated by those skilled in the art, stapling may provide more than one stereoisomers (e.g., E/Z of double bonds and/or diastereomers).

[1088] In some embodiments, a double bond in a staple is E. In some embodiments, a double bond in a staple is Z. In some embodiments, isomers (or combinations thereof) are listed separately (typically based on reverse phase HPLC peaks (e.g., detected by UV (e.g., at 220 nm) and/or MS) in the order of elution: each earlier eluted peak is assigned a smaller ID number than each later eluted peaks (if any); in some cases, a peak may contain two or more isomers; in some cases, isomers are not separated (or single isomer), e.g., when there is one peak on HPLC). Compositions utilized in various assays are typically of stapled peptides; the present disclosure also provides peptides prior to stapling and compositions thereof. A general HPLC method: Xselect CSH C₁₈ column 1.7 um 2.1×50 mm 130 Å; Column temperature 40° C.; Flow 0.6 mL/min; 0.1% formic acid in both acetonitrile and water, 7.2 min gradient from 5 to 95% acetonitrile. In some embodiments, a different gradient and/or a C8 column were used.

| 1 | Description |
|---|---|
| I-1 | Ac-PL3-Asp-Leu-B5-Asp-Asp-Ala-Ala-Phe-dLys*3-PyrS2-3Thi-BztA-GlnR*3-NH2 |
| I-2 | Ac-PL3-Asp-Leu-B5-Asp-Asp-Ala-Ala-Phe-dLys*3-PyrS2-3Thi-BztA-GlnR*3-NH2 |
| I-3 | Ac-PL3-Asp-Leu-B5-Asp-Asp-Ala-Ala-Phe-Lys*3-PyrS2-3Thi-BztA-GlnR*3-NH2 |
| I-4 | Ac-PL3-Asp-Leu-B5-Asp-Asp-Ala-Ala-Phe-Lys*3-PyrS2-3Thi-BztA-GlnR*3-NH2 |
| I-5 | Ac-PL3-Asp-Leu-B5-Asp-Asp-Ala-Ala-Phe-DGlnR*3-PyrS2-3Thi-BztA-Lys*3-NH2 |
| I-6 | Ac-PL3-Asp-Leu-B5-Asp-Asp-Ala-Ala-Phe-GlnR*3-PyrS2-3Thi-BztA-Lys*3-NH2 |
| I-7 | Ac-PL3-Asp-Leu-B5-Asp-Asp-Lys*3-Ala-Phe-GlnR*3-PyrS2-3Thi-BztA-Gln-NH2 |
| I-8 | Ac-PL3-Asp-Leu-B5-Asp-Asp-GlnR*3-Ala-Phe-Lys*3-PyrS2-3Thi-BztA-Gln-NH2 |
| I-9 | Ac-PL3-Asp-Leu-B5-Asp-3COOHF-Ala-Ala-Phe-dLys*3-PyrS2-3Thi-BztA-GlnR*3-NH2 |
| I-10 | Ac-PL3-Asp-Leu-B5-Asp-3COOHF-Ala-Ala-Phe-dLys*3-PyrS2-3Thi-BztA-GlnR*3-NH2 |
| I-11 | Ac-PL3-Asp-Leu-B5-Asp-3COOHF-Ala-Ala-Phe-Lys*3-PyrS2-3Thi-BztA-GlnR*3-NH2 |
| I-12 | Ac-PL3-Asp-Leu-B5-Asp-3COOHF-Ala-Ala-Phe-Lys*3-PyrS2-3Thi-BztA-GlnR*3-NH2 |
| I-13 | Ac-PL3-Asp-Leu-B5-Asp-3COOHF-Ala-Ala-Phe-DGlnR*3-PyrS2-3Thi-BztA-Lys*3-NH2 |
| I-14 | Ac-PL3-Asp-Leu-B5-Asp-3COOHF-Ala-Ala-Phe-DGlnR*3-PyrS2-3Thi-BztA-Lys*3-NH2 |
| I-15 | Ac-PL3-Asp-Leu-B5-Asp-3COOHF-Ala-Ala-Phe-GlnR*3-PyrS2-3Thi-BztA-Lys*3-NH2 |
| I-16 | Ac-PL3-Asp-Leu-B5-Asp-3COOHF-Ala-Ala-Phe-GlnR*3-PyrS2-3Thi-BztA-Lys*3-NH2 |
| I-17 | Ac-PL3-Asp-Npg-B5-Asp-Asp-Ala-Ala-Phe-TriAzLys*3-PyrS2-3Thi-BztA-sAla*3-NH2 |
| I-18 | Ac-PL3-Asp-Npg-B5-Asp-Asp-Ala-Ala-Phe-TriAzLys*3-PyrS2-3Thi-BztA-sAla*3-NH2 |
| I-19 | Ac-PL3-Asp-Npg-B5-Asp-3COOHF-Ala-Ala-Phe-TriAzLys*3-PyrS2-3Thi-BztA-sAla*3-NH2 |
| I-20 | Ac-PL3-Asp-Npg-B5-Asp-3COOHF-Ala-Ala-Phe-TriAzLys*3-PyrS2-3Thi-BztA-sAla*3-NH2 |
| I-21 | Ac-PL3-Asp-Npg-B5-Asp-3COOHF-Ala-Ala-Phe-TriAzLys*3-PyrS2-2F3MeF-BztA-sAla*3- |
| | NH2 |
| I-22 | Ac-PL3-Asp-Npg-B5-Asp-3COOHF-Ala-Ala-Phe-TriAzLys*3-PyrS2-2F3MeF-BztA-sAla*3- |
| | NH2 |
| I-23 | Ac-PL3-Asp-Npg-B5-Asp-Asp-Ala-Ala-Phe-sAla*3-PyrS2-3Thi-BztA-TriAzLys*3-NH2 |
| I-24 | Ac-PL3-Asp-Npg-B5-Asp-3COOHF-Ala-Ala-Phe-sAla*3-PyrS2-3Thi-BztA-TriAzLys*3-NH2 |
| I-25 | Ac-PL3-Asp-Npg-B5-Asp-3COOHF-Ala-Ala-Phe-sAla*3-PyrS2-2F3MeF-BztA-TriAzLys*3- |
| | NH2 |
| I-26 | Ac-PL3-Asp-Npg-B5-Asp-Asp-sAla*3-Ala-Phe-TriAzLys*3-PyrS2-3Thi-BztA-Gln-NH2 |
| I-27 | Ac-PL3-Asp-Npg-B5-Asp-3COOHF-sAla*3-Ala-Phe-TriAzLys*3-PyrS2-3Thi-BztA-Gln-NH2 |
| I-28 | Ac-PL3-Asp-Npg-B5-Asp-3COOHF-sAla*3-Ala-Phe-TriAzLys*3-PyrS2-2F3MeF-BztA-Gln- |
| | NH2 |
| I-29 | Ac-PL3-Asp-Npg-B5-Asp-Asp-TriAzLys*3-Ala-Phe-sAla*3-PyrS2-3Thi-BztA-Gln-NH2 |
| I-30 | Ac-PL3-Asp-Npg-B5-Asp-3COOHF-TriAzLys*3-Ala-Phe-sAla*3-PyrS2-3Thi-BztA-Gln-NH2 |
| I-31 | Ac-PL3-Asp-Npg-B5-Asp-3COOHF-TriAzLys*3-Ala-Phe-sAla*3-PyrS2-2F3MeF-BztA-Gln- |
| | NH2 |
| I-32 | Ac-PL3-Asp-Npg-B5-Asp-3COOHF-Ala-Ala-Phe-Lys*3-PyrS2-3Thi-BztA-GlnR*3-NH2 |
| I-33 | Ac-PL3-Asp-Npg-B5-Asp-3COOHF-Ala-Ala-Phe-GlnR*3-PyrS2-3Thi-BztA-Lys*3-NH2 |
| I-34 | Ac-PL3-Asp-Npg-B5-Asp-3COOHF-Ala-Ala-Phe-Lys*3-PyrS2-3Thi-BztA-AsnR*3-NH2 |
| I-35 | Ac-PL3-Asp-Npg-B5-Asp-3COOHF-Ala-Ala-Phe-AsnR*3-PyrS2-3Thi-BztA-Lys*3-NH2 |
| I-36 | Ac-PL3-Asp-Npg-B5-Asp-3COOHF-Ala-Ala-Phe-AsnR*3-PyrS2-3Thi-BztA-Lys*3-NH2 |
| I-37 | Ac-PL3-Asp-Npg-B5-Asp-3COOHF-Ala-Ala-Phe-Orn*3-PyrS2-3Thi-BztA-GlnR*3-NH2 |
| I-38 | Ac-PL3-Asp-Npg-B5-Asp-3COOHF-Ala-Ala-Phe-GlnR*3-PyrS2-3Thi-BztA-Orn*3-NH2 |
| I-39 | Ac-PL3-Asp-Npg-B5-Asp-3COOHF-Ala-Ala-Phe-Orn*3-PyrS2-3Thi-BztA-AsnR*3-NH2 |
| I-40 | Ac-PL3-Asp-Npg-B5-Asp-3COOHF-Ala-Ala-Phe-AsnR*3-PyrS2-3Thi-BztA-Orn*3-NH2 |
| I-41 | Ac-PL3-Asp-Npg-B5-Asp-3COOHF-Ala-Ala-Phe-AsnR*3-PyrS2-3Thi-BztA-Orn*3-NH2 |
| I-42 | Ac-PL3-Asp-Npg-B5-Asp-3COOHF-Ala-Ala-Phe-Lys*3-PyrS2-3Thi-BztA-GlnR*3-Ala-NH2 |
| I-43 | Ac-PL3-Asp-Npg-B5-Asp-3COOHF-Ala-Ala-Phe-GlnR*3-PyrS2-3Thi-BztA-Lys*3-Ala-NH2 |
| I-44 | Ac-PL3-Asp-Npg-B5-Asp-3COOHF-Ala-Ala-Phe-AsnR*3-PyrS2-3Thi-BztA-Lys*3-Ala-NH2 |
| I-45 | Ac-PL3-Asp-Npg-B5-Asp-3COOHF-[isophthalate]-Lys-Ala-Phe-Leu-PyrS2-3Thi-BztA-Lys-NH2 |
| I-46 | Ac-PL3-Asp-Npg-B5-Asp-3COOHF-[succinate]-Lys-Ala-Phe-Leu-PyrS2-3Thi-BztA-Lys-NH2 |
| I-47 | Ac-PL3-Asp-Npg-B5-Asp-3COOHF-[Me2Mal]-Lys-Ala-Phe-Leu-PyrS2-3Thi-BztA-Lys-NH2 |
| I-48 | Ac-PL3-Asp-Npg-B5-Asp-3COOHF-[diphenate]-Lys-Ala-Phe-Leu-PyrS2-3Thi-BztA-Lys-NH2 |
| I-49 | Ac-PL3-Asp-Npg-B5-Asp-3COOHF-[Biphen33COOH]-Lys-Ala-Phe-Leu-PyrS2-3Thi-BztA-Lys- |
| | NH2 |
| I-50 | Ac-PL3-Asp-Npg-B5-Asp-3COOHF-[isophthalate]-Lys-Ala-Phe-Leu-PyrS2-2ClF-BztA-Lys-NH2 |
| I-51 | Ac-PL3-Asp-Npg-B5-Asp-3COOHF-[succinate]-Lys-Ala-Phe-Leu-PyrS2-2ClF-BztA-Lys-NH2 |
| I-52 | Ac-PL3-Asp-Npg-B5-Asp-3COOHF-[Me2Mal]Lys-Ala-Phe-Leu-PyrS2-2ClF-BztA-Lys-NH2 |
| I-53 | Ac-PL3-Asp-Npg-B5-Asp-3COOHF-[diphenate]Lys-Ala-Phe-Leu-PyrS2-2ClF-BztA-Lys-NH2 |
| I-54 | Ac-PL3-Asp-Npg-B5-Asp-3COOHF-[Biphen33COOH]Lys-Ala-Phe-Leu-PyrS2-2ClF-BztA-Lys- |
| | NH2 |
| I-55 | Ac-PL3-Asp-Npg-B5-Asp-3COOHF-Ala-Ala-Phe-Lys*3-PyrS2-2F3MeF-BztA-GlnR*3-NH2 |
| I-56 | Ac-PL3-Asp-Npg-B5-Asp-3COOHF-Ala-Ala-Phe-Lys*3-PyrS2-2F3MeF-BztA-AsnR*3-NH2 |
| I-57 | Ac-PL3-Asp-Npg-B5-Asp-3COOHF-Ala-Ala-Phe-Lys*3-PyrS2-2F3MeF-BztA-GlnR*3-Ala-NH2 |
| I-58 | Ac-PL3-Asp-Npg-B5-Asp-3COOHF-Ala-Ala-Phe-Lys*3-PyrS2-2F3MeF-BztA-AsnR*3-Ala- |
| | NH2 |
| I-59 | Ac-PL3-Asp-Npg-B5-Asp-3COOHF-Ala-Ala-Phe-Lys*3-PyrS2-2F3MeF-BztA-AsnR*3-Ala- |
| | NH2 |
| I-60 | Ac-PL3-Asp-Npg-B5-Asp-3COOHF-Gln-Ala-Phe-Lys*3-PyrS2-2F3MeF-BztA-GlnR*3-Ala-NH2 |
| I-61 | Ac-PL3-Asp-Npg-B5-Asp-3COOHF-Gln-Ala-Phe-Lys*3-PyrS2-2F3MeF-BztA-AsnR*3-Ala- |
| | NH2 |
| I-62 | Ac-PL3-Asp-Npg-B5-Asp-3COOHF-Ala-Ala-Phe-Lys*3-PyrS2-3Thi-BztA-GlnR*3-Throl |
| I-63 | Ac-PL3-Asp-Npg-B5-Asp-3COOHF-Ala-Ala-Phe-Lys*3-PyrS2-3Thi-BztA-GlnR*3-Throl |
| I-64 | Ac-PL3-Asp-Npg-B5-Asp-3COOHF-Ala-Ala-Phe-Lys*3-PyrS2-3Thi-BztA-GlnR*3-Prool |
| I-65 | Ac-PL3-Asp-Npg-B5-Asp-3COOHF-Ala-Ala-Phe-Lys*3-PyrS2-3Thi-BztA-GlnR*3-Alaol |
| I-66 | Ac-PL3-Asp-Npg-B5-Asp-3COOHF-Aib-Ala-Phe-Lys*3-PyrS2-3Thi-BztA-GlnR*3-Ala-NH2 |
| I-67 | Ac-PL3-Asp-Npg-B5-Asp-3COOHF-Aib-Ala-Phe-Lys*3-PyrS2-3Thi-BztA-GlnR*3-Ala-NH2 |
| I-68 | Ac-PL3-Asp-Npg-B5-Asp-3COOHF-Aib-Ala-Phe-Lys*3-PyrS2-2F3MeF-BztA-GlnR*3-Ala-NH2 |
| I-69 | Ac-PL3-Asp-Npg-B5-Asp-3COOHF-Aib-Ala-Phe-Lys*3-PyrS2-2F3MeF-BztA-GlnR*3-Ala-NH2 |
| I-70 | Ac-PL3-Asp-Npg-B5-Asp-3COOHF-nLeu-Ala-Phe-Lys*3-PyrS2-3Thi-BztA-GlnR*3-Ala-NH2 |
| I-71 | Ac-PL3-Asp-Npg-B5-Asp-3COOHF-nLeu-Ala-Phe-Lys*3-PyrS2-2F3MeF-BztA-GlnR*3-Ala- |
| | NH2 |
| I-72 | Ac-PL3-Asp-Npg-B5-Asp-3COOHF-Thr-Ala-Phe-Lys*3-PyrS2-3Thi-BztA-GlnR*3-Ala-NH2 |
| I-73 | Ac-PL3-Asp-Npg-B5-Asp-3COOHF-Thr-Ala-Phe-Lys*3-PyrS2-2F3MeF-BztA-GlnR*3-Ala-NH2 |
| I-74 | Ac-PL3-Asp-GlnR**3-B5-Asp-3COOHF-Lys**3-Ala-Phe-Lys*3-PyrS2-3Thi-BztA-GlnR*3-Ala- |
| | NH2 |
| I-75 | Ac-PL3-Asp-GlnR**3-B5-Asp-3COOHF-Lys**3-Ala-Phe-Lys*3-PyrS2-2F3MeF-BztA-GlnR*3- |
| | Ala-NH2 |
| I-76 | Ac-PL3-Asp-Npg-B5-Asp-3COOHF-Ala-Ala-Phe-Lys*3-PyrS2-3Thi-BztA-GlnR*3-Ala-NH2 |
| I-77 | Ac-PL3-Asp-Npg-B5-Asp-3COOHF-Ala-Ala-Phe-Lys*3-PyrS2-2F3MeF-BztA-GlnR*3-Ala-NH2 |
| I-78 | Ac-PL3-Asp-GlnR**3-B5-Asp-3COOHF-Lys**3-Ala-Phe-Lys*3-PyrS2-3Thi-BztA-GlnR*3-Ala- |
| | NH2 |
| I-79 | Ac-PL3-Asp-GlnR**3-B5-Asp-3COOHF-Lys**3-Ala-Phe-Lys*3-PyrS2-2F3MeF-BztA-GlnR*3- |
| | Ala-NH2 |
| I-80 | Ac-PL3-Asn-Npg-B5-Asp-3COOHF-Ala-Ala-Phe-Lys*3-PyrS2-3Thi-BztA-GlnR*3-Ala-NH2 |
| I-81 | Ac-PL3-Hse-Npg-B5-Asp-3COOHF-Ala-Ala-Phe-Lys*3-PyrS2-3Thi-BztA-GlnR*3-Ala-NH2 |
| I-82 | Ac-PL3-Asp-Npg-B5-Asn-3COOHF-Ala-Ala-Phe-Lys*3-PyrS2-3Thi-BztA-GlnR*3-Ala-NH2 |
| I-83 | Ac-PL3-Asp-Npg-B5-Hse-3COOHF-Ala-Ala-Phe-Lys*3-PyrS2-3Thi-BztA-GlnR*3-Ala-NH2 |
| I-84 | Ac-PL3-Asn-Npg-B5-Asp-3COOHF-Ser-Ala-Phe-Lys*3-PyrS2-3Thi-BztA-GlnR*3-Ala-NH2 |
| I-85 | Ac-PL3-Hse-Npg-B5-Asp-3COOHF-Ser-Ala-Phe-Lys*3-PyrS2-3Thi-BztA-GlnR*3-Ala-NH2 |
| I-86 | Ac-PL3-Asp-Npg-B5-Asn-3COOHF-Ser-Ala-Phe-Lys*3-PyrS2-3Thi-BztA-GlnR*3-Ala-NH2 |
| I-87 | Ac-PL3-Asp-Npg-B5-Hse-3COOHF-Ser-Ala-Phe-Lys*3-PyrS2-3Thi-BztA-GlnR*3-Ala-NH2 |
| I-88 | Ac-PL3-Asn-Npg-B5-Asp-3COOHF-Gln-Ala-Phe-Lys*3-PyrS2-3Thi-BztA-GlnR*3-Ala-NH2 |
| I-89 | Ac-PL3-Hse-Npg-B5-Asp-3COOHF-Gln-Ala-Phe-Lys*3-PyrS2-3Thi-BztA-GlnR*3-Ala-NH2 |
| I-90 | Ac-PL3-Asp-Npg-B5-Asn-3COOHF-Gln-Ala-Phe-Lys*3-PyrS2-3Thi-BztA-GlnR*3-Ala-NH2 |
| I-91 | Ac-PL3-Asp-Npg-B5-Hse-3COOHF-Gln-Ala-Phe-Lys*3-PyrS2-3Thi-BztA-GlnR*3-Ala-NH2 |
| I-92 | Ac-PL3-Asp-Npg-B5-Asp-3COOHF-GlnR-Ala-Phe-Leu-PyrS2-2F3MeF-BztA- |
| | [diaminobutane]GlnR-Ala-NH2 |
| I-93 | Ac-PL3-Asp-Npg-B5-Asp-3COOHF-GlnR-Ala-Phe-Leu-PyrS2-2F3MeF-BztA- |
| | [4aminopiperidine]GlnR-Ala-NH2 |
| I-94 | Ac-PL3-Asp-Npg-B5-Asp-3COOHF-[4aminopiperidine]GlnR-Ala-Phe-Leu-PyrS2-2F3MeF- |
| | BztA-GlnR-Ala-NH2 |
| I-95 | Ac-PL3-Asp-Npg-B5-Asp-3COOHF-GlnR-Ala-Phe-Leu-PyrS2-2F3MeF-BztA- |
| | [4mampiperidine]GlnR-Ala-NH2 |
| I-96 | Ac-PL3-Asp-Npg-B5-Asp-3COOHF-GlnR-Ala-Phe-Leu-PyrS2-2F3MeF-BztA- |
| | [4mampiperidine]GlnR-Ala-NH2 |
| I-97 | Ac-PL3-Asp-Cha-B5-Asp-3COOHF-Ala-Ala-Phe-Lys*3-PyrS2-2F3MeF-BztA-GlnR*3-Ala-NH2 |
| I-98 | Ac-PL3-Asp-Cha-B5-Asp-3COOHF-Ala-Ala-Phe-Lys*3-PyrS2-2F3MeF-BztA-GlnR*3-Ala-NH2 |
| I-99 | Ac-PL3-Asp-Npg-B5-Asp-3COOHF-Npg-Ala-Phe-Lys*3-PyrS2-2F3MeF-BztA-GlnR*3-Ala- |
| | NH2 |
| I-100 | Ac-PL3-Asp-Npg-B5-Asp-3COOHF-Npg-Ala-Phe-Lys*3-PyrS2-2F3MeF-BztA-GlnR*3-Ala- |
| | NH2 |
| I-101 | Ac-PL3-Asp-Npg-B5-Asp-3COOHF-Cha-Ala-Phe-Lys*3-PyrS2-2F3MeF-BztA-GlnR*3-Ala- |
| | NH2 |
| I-102 | Ac-PL3-Asp-Npg-B5-Asp-3COOHF-Cha-Ala-Phe-Lys*3-PyrS2-2F3MeF-BztA-GlnR*3-Ala- |
| | NH2 |
| I-103 | Ac-PL3-Asp-Cha-B5-Asp-3COOHF-Cha-Ala-Phe-Lys*3-PyrS2-2F3MeF-BztA-GlnR*3-Ala-NH2 |
| I-104 | Ac-PL3-Asp-Npg-B5-Asp-3COOHF-Ala-Ala-Phe-Lys*3-PyrS2-2F3MeF-BztA-GlnR*3-Leu- |
| | NH2 |
| I-105 | Ac-PL3-Asp-Npg-B5-Asp-3COOHF-Ala-Ala-Phe-Lys*3-PyrS2-2F3MeF-BztA-GlnR*3-Leu- |
| | NH2 |
| I-106 | Ac-PL3-Asp-Cha-B5-Asp-3COOHF-Ala-Ala-Phe-Lys*3-PyrS2-2F3MeF-BztA-GlnR*3-Leu-NH2 |
| I-107 | Ac-PL3-Asp-Cha-B5-Asp-3COOHF-Ala-Ala-Phe-Lys*3-PyrS2-2F3MeF-BztA-GlnR*3-Leu-NH2 |
| I-108 | Ac-PL3-Asp-Npg-B5-Asp-3COOHF-Npg-Ala-Phe-Lys*3-PyrS2-2F3MeF-BztA-GlnR*3-Leu- |
| | NH2 |
| I-109 | Ac-PL3-Asp-Npg-B5-Asp-3COOHF-Npg-Ala-Phe-Lys*3-PyrS2-2F3MeF-BztA-GlnR*3-Leu- |
| | NH2 |
| I-110 | Ac-PL3-Asp-Npg-B5-Asp-3COOHF-Cha-Ala-Phe-Lys*3-PyrS2-2F3MeF-BztA-GlnR*3-Leu- |
| | NH2 |
| I-111 | Ac-PL3-Asp-Npg-B5-Asp-3COOHF-Cha-Ala-Phe-Lys*3-PyrS2-2F3MeF-BztA-GlnR*3-Leu- |
| | NH2 |
| I-112 | Ac-PL3-Asp-Npg-B5-Asp-TfeGA-Ala-Ala-Phe-Lys*3-PyrS2-2F3MeF-BztA-GlnR*3-Ala-NH2 |
| I-113 | Ac-PL3-Asn-Npg-B5-Asp-TfeGA-Ala-Ala-Phe-Lys*3-PyrS2-2F3MeF-BztA-GlnR*3-Ala-NH2 |
| I-114 | Ac-PL3-Asn-Npg-B5-Asp-TfeGA-Ala-Ala-Phe-Lys*3-PyrS2-2F3MeF-BztA-GlnR*3-Ala-NH2 |
| I-115 | Ac-PL3-Hse-Npg-B5-Asp-TfeGA-Ala-Ala-Phe-Lys*3-PyrS2-2F3MeF-BztA-GlnR*3-Ala-NH2 |
| I-116 | Ac-PL3-Hse-Npg-B5-Asp-TfeGA-Ala-Ala-Phe-Lys*3-PyrS2-2F3MeF-BztA-GlnR*3-Ala-NH2 |
| I-117 | Ac-PL3-Asp-Npg-B5-Asn-TfeGA-Ala-Ala-Phe-Lys*3-PyrS2-2F3MeF-BztA-GlnR*3-Ala-NH2 |
| I-118 | Ac-PL3-Asp-Npg-B5-Hse-TfeGA-Ala-Ala-Phe-Lys*3-PyrS2-2F3MeF-BztA-GlnR*3-Ala-NH2 |
| I-119 | Ac-PL3-Asp-Npg-B5-Hse-TfeGA-Ala-Ala-Phe-Lys*3-PyrS2-2F3MeF-BztA-GlnR*3-Ala-NH2 |
| I-120 | Ac-PL3-Asp-Npg-B5-Asp-TfeGA-Aib-Ala-Phe-Lys*3-PyrS2-2F3MeF-BztA-GlnR*3-Ala-NH2 |
| I-121 | Ac-PL3-Asp-Npg-B5-Asp-TfeGA-Aib-Ala-Phe-Lys*3-PyrS2-2F3MeF-BztA-GlnR*3-Ala-NH2 |
| I-122 | Ac-PL3-Asp-Npg-B5-Asp-TfeGA-Leu-Ala-Phe-Lys*3-PyrS2-2F3MeF-BztA-GlnR*3-Ala-NH2 |
| I-123 | Ac-PL3-Asp-Npg-B5-Asp-TfeGA-Phe-Ala-Phe-Lys*3-PyrS2-2F3MeF-BztA-GlnR*3-Ala-NH2 |
| I-124 | Ac-PL3-Asp-Npg-B5-Asp-TfeGA-Val-Ala-Phe-Lys*3-PyrS2-2F3MeF-BztA-GlnR*3-Ala-NH2 |
| I-125 | Ac-PL3-Asp-Npg-B5-Asp-TfeGA-Val-Ala-Phe-Lys*3-PyrS2-2F3MeF-BztA-GlnR*3-Ala-NH2 |
| I-126 | Ac-PL3-Asp-Npg-B5-Asp-TfeGA-Ala-Ala-Phe-Lys*3-PyrS2-2F3MeF-BztA-GlnR*3-Aib-NH2 |
| I-127 | Ac-PL3-Asp-Npg-B5-Asp-TfeGA-Ala-Ala-Phe-Lys*3-PyrS2-2F3MeF-BztA-GlnR*3-Aib-NH2 |
| I-128 | Ac-PL3-Asp-Npg-B5-Asp-TfeGA-Ala-Ala-Phe-Lys*3-PyrS2-2F3MeF-BztA-GlnR*3-Leu-NH2 |
| I-129 | Ac-PL3-Asp-Npg-B5-Asp-TfeGA-Ala-Ala-Phe-Lys*3-PyrS2-2F3MeF-BztA-GlnR*3-Val-NH2 |
| I-130 | Ac-PL3-Asp-Npg-B5-Asp-3COOHF-GlnR-Ala-Phe-Leu-PyrS2-2F3MeF-BztA- |
| | [39N2spiroundecane]GlnR-Ala-NH2 |
| I-131 | Ac-PL3-Asp-Npg-B5-Asp-3COOHF-GlnR-Ala-Phe-Leu-PyrS2-2F3MeF-BztA- |
| | [29N2spiroundecane]GlnR-Ala-NH2 |
| I-132 | Ac-PL3-Asp-Npg-B5-Asp-3COOHF-[29N2spiroundecane]GlnR-Ala-Phe-Leu-PyrS2-2F3MeF- |
| | BztA-GlnR-Ala-NH2 |
| I-133 | Ac-PL3-Asp-Npg-B5-Asp-3COOHF-GlnR-Ala-Phe-Leu-PyrS2-2F3MeF-BztA- |
| | [39N2spiroundecane]GlnR-Ala-NH2 |
| I-134 | Ac-PL3-Asp-Npg-B5-Asp-3COOHF-GlnR-Ala-Phe-Leu-PyrS2-2F3MeF-BztA- |
| | [29N2spiroundecane]GlnR-Ala-NH2 |
| I-135 | Ac-PL3-Asp-Npg-B5-Asp-3COOHF-[29N2spiroundecane]GlnR-Ala-Phe-Leu-PyrS2-2F3MeF- |
| | BztA-GlnR-Ala-NH2 |
| I-136 | Ac-PL3-Asp-Npg-B5-Asp-3COOHF-Ala-Ala-Phe-Lys*3-PyrS2-2F3MeF-BztA-GlnR*3-Leu-Ser- |
| | NH2 |
| I-137 | Ac-PL3-Asp-Npg-B5-Asp-3COOHF-nLeu-Ala-Phe-Lys*3-PyrS2-2F3MeF-BztA-GlnR*3-Leu- |
| | Ser-NH2 |
| I-138 | Ac-PL3-Asp-Npg-B5-Asp-3COOHF-Aib-Ala-Phe-Lys*3-PyrS2-2F3MeF-BztA-GlnR*3-Leu-Ser- |
| | NH2 |
| I-139 | Ac-PL3-Asp-Npg-B5-Asp-3COOHF-Cpg-Ala-Phe-Lys*3-PyrS2-2F3MeF-BztA-GlnR*3-Leu-Ser- |
| | NH2 |
| I-140 | Ac-PL3-Asp-Npg-B5-Asp-3COOHF-Cbg-Ala-Phe-Lys*3-PyrS2-2F3MeF-BztA-GlnR*3-Leu-Ser- |
| | NH2 |
| I-141 | Ac-PL3-Asp-Npg-B5-Asp-3COOHF-CyLeu-Ala-Phe-Lys*3-PyrS2-2F3MeF-BztA-GlnR*3-Leu- |
| | Ser-NH2 |
| I-142 | Ac-PL3-Asn-Npg-B5-Asp-3COOHF-Ala-Ala-Phe-Lys*3-PyrS2-2F3MeF-BztA-GlnR*3-Leu-Ser- |
| | NH2 |
| I-143 | Ac-PL3-Asn-Npg-B5-Asp-3COOHF-nLeu-Ala-Phe-Lys*3-PyrS2-2F3MeF-BztA-GlnR*3-Leu- |
| | Ser-NH2 |
| I-144 | Ac-PL3-Asn-Npg-B5-Asp-3COOHF-Aib-Ala-Phe-Lys*3-PyrS2-2F3MeF-BztA-GlnR*3-Leu-Ser- |
| | NH2 |
| I-145 | Ac-PL3-Hse-Npg-B5-Asp-3COOHF-Ala-Ala-Phe-Lys*3-PyrS2-2F3MeF-BztA-GlnR*3-Leu-Ser- |
| | NH2 |
| I-146 | Ac-PL3-Hse-Npg-B5-Asp-3COOHF-nLeu-Ala-Phe-Lys*3-PyrS2-2F3MeF-BztA-GlnR*3-Leu- |
| | Ser-NH2 |
| I-147 | Ac-PL3-Hse-Npg-B5-Asp-3COOHF-Aib-Ala-Phe-Lys*3-PyrS2-2F3MeF-BztA-GlnR*3-Leu-Ser- |
| | NH2 |
| I-148 | Ac-PL3-Asn-Cha-B5-Asp-Gln-Hse-Ala-Phe-GlnR*3-PyrS2-Phe-BztA-Lys*3-NH2 |
| I-149 | Ac-PL3-Asn-Cha-B5-Asp-Gln-iPrLys-Ala-Phe-GlnR*3-PyrS2-Phe-BztA-Lys*3-NH2 |
| I-150 | Ac-PL3-Asn-Cha-B5-Asp-Thr-iPrLys-Ala-Phe-GlnR*3-PyrS2-Phe-BztA-Lys*3-NH2 |
| I-151 | Ac-PL3-Asn-Cha-B5-Asp-Gln-Hse-Ala-Phe-GlnR*3-PyrS2-3Thi-BztA-Lys*3-NH2 |
| I-152 | Ac-PL3-Asn-Cha-B5-Asp-Gln-iPrLys-Ala-Phe-GlnR*3-PyrS2-3Thi-BztA-Lys*3-NH2 |
| I-153 | Ac-PL3-Asn-Cha-B5-Asp-Gln-Hse-Ala-Phe-GlnR*3-PyrS2-Phe-BztA-Lys*3-NH2 |
| I-154 | Ac-PL3-Asn-Cha-B5-Asp-Gln-iPrLys-Ala-Phe-GlnR*3-PyrS2-Phe-BztA-Lys*3-NH2 |
| I-155 | Ac-PL3-Asn-Cha-B5-Asp-Thr-Hse-Ala-Phe-GlnR*3-PyrS2-Phe-BztA-Lys*3-NH2 |
| I-156 | Ac-PL3-Asn-Cha-B5-Asp-Thr-iPrLys-Ala-Phe-GlnR*3-PyrS2-Phe-BztA-Lys*3-NH2 |
| I-157 | Ac-PL3-Asn-Cha-B5-Asp-Gln-Hse-Ala-Phe-GlnR*3-PyrS2-3Thi-BztA-Lys*3-NH2 |
| I-158 | Ac-PL3-Asn-Cha-B5-Asp-Gln-iPrLys-Ala-Phe-GlnR*3-PyrS2-3Thi-BztA-Lys*3-NH2 |
| I-159 | Ac-PL3-Asn-Npg-B5-Asp-3COOHF-Aib-Ala-Phe-Lys*3-PyrS2-3Thi-BztA-GlnR*3-Ala-NH2 |
| I-160 | Ac-PL3-Ser-Npg-B5-Asp-3COOHF-Aib-Ala-Phe-Lys*3-PyrS2-3Thi-BztA-GlnR*3-Ala-NH2 |
| I-161 | Ac-PL3-Thr-Npg-B5-Asp-3COOHF-Aib-Ala-Phe-Lys*3-PyrS2-3Thi-BztA-GlnR*3-Ala-NH2 |
| I-162 | Ac-PL3-Hse-Npg-B5-Asp-3COOHF-Aib-Ala-Phe-Lys*3-PyrS2-3Thi-BztA-GlnR*3-Ala-NH2 |
| I-163 | Ac-PL3-aThr-Npg-B5-Asp-3COOHF-Aib-Ala-Phe-Lys*3-PyrS2-3Thi-BztA-GlnR*3-Ala-NH2 |
| I-164 | Ac-PL3-MeAsn-Npg-B5-Asp-3COOHF-Aib-Ala-Phe-Lys*3-PyrS2-3Thi-BztA-GlnR*3-Ala-NH2 |
| I-165 | Ac-PL3-Asp-Npg-B5-Asn-3COOHF-Aib-Ala-Phe-Lys*3-PyrS2-3Thi-BztA-GlnR*3-Ala-NH2 |
| I-166 | Ac-PL3-Asp-Npg-B5-Ser-3COOHF-Aib-Ala-Phe-Lys*3-PyrS2-3Thi-BztA-GlnR*3-Ala-NH2 |
| I-167 | Ac-PL3-Asp-Npg-B5-Thr-3COOHF-Aib-Ala-Phe-Lys*3-PyrS2-3Thi-BztA-GlnR*3-Ala-NH2 |
| I-168 | Ac-PL3-Asp-Npg-B5-Hse-3COOHF-Aib-Ala-Phe-Lys*3-PyrS2-3Thi-BztA-GlnR*3-Ala-NH2 |
| I-169 | Ac-PL3-Asp-Npg-B5-aThr-3COOHF-Aib-Ala-Phe-Lys*3-PyrS2-3Thi-BztA-GlnR*3-Ala-NH2 |
| I-170 | Ac-PL3-Asp-Npg-B5-MeAsn-3COOHF-Aib-Ala-Phe-Lys*3-PyrS2-3Thi-BztA-GlnR*3-Ala-NH2 |
| I-171 | Ac-PL3-Asn-Npg-B5-Asp-3COOHF-Aib-Ala-Phe-Lys*3-PyrS2-3Thi-BztA-GlnR*3-Ala-NH2 |
| I-172 | Ac-PL3-Ser-Npg-B5-Asp-3COOHF-Aib-Ala-Phe-Lys*3-PyrS2-3Thi-BztA-GlnR*3-Ala-NH2 |
| I-173 | Ac-PL3-Thr-Npg-B5-Asp-3COOHF-Aib-Ala-Phe-Lys*3-PyrS2-3Thi-BztA-GlnR*3-Ala-NH2 |
| I-174 | Ac-PL3-Hse-Npg-B5-Asp-3COOHF-Aib-Ala-Phe-Lys*3-PyrS2-3Thi-BztA-GlnR*3-Ala-NH2 |
| I-175 | Ac-PL3-aThr-Npg-B5-Asp-3COOHF-Aib-Ala-Phe-Lys*3-PyrS2-3Thi-BztA-GlnR*3-Ala-NH2 |
| I-176 | Ac-PL3-MeAsn-Npg-B5-Asp-3COOHF-Aib-Ala-Phe-Lys*3-PyrS2-3Thi-BztA-GlnR*3-Ala-NH2 |
| I-177 | Ac-PL3-Asp-Npg-B5-Asn-3COOHF-Aib-Ala-Phe-Lys*3-PyrS2-3Thi-BztA-GlnR*3-Ala-NH2 |
| I-178 | Ac-PL3-Asp-Npg-B5-Ser-3COOHF-Aib-Ala-Phe-Lys*3-PyrS2-3Thi-BztA-GlnR*3-Ala-NH2 |
| I-179 | Ac-PL3-Asp-Npg-B5-Thr-3COOHF-Aib-Ala-Phe-Lys*3-PyrS2-3Thi-BztA-GlnR*3-Ala-NH2 |
| I-180 | Ac-PL3-Asp-Npg-B5-Hse-3COOHF-Aib-Ala-Phe-Lys*3-PyrS2-3Thi-BztA-GlnR*3-Ala-NH2 |
| I-181 | Ac-PL3-Asp-Npg-B5-aThr-3COOHF-Aib-Ala-Phe-Lys*3-PyrS2-3Thi-BztA-GlnR*3-Ala-NH2 |
| I-182 | Ac-PL3-Asp-Npg-B5-MeAsn-3COOHF-Aib-Ala-Phe-Lys*3-PyrS2-3Thi-BztA-GlnR*3-Ala-NH2 |
| I-183 | Ac-PL3-Asp-Npg-B5-Asp-3COOHF-Ala-Ala-Phe-Lys*3-PyrS2-3Thi-BztA-hGlnR*3-Ala-NH2 |
| I-184 | Ac-PL3-Asp-Npg-B5-Asp-3COOHF-Ala-Ala-Phe-Lys*3-PyrS2-2F3MeF-BztA-hGlnR*3-Ala- |
| | NH2 |
| I-185 | Ac-PL3-Asp-Npg-B5-Asp-3COOHF-Ala-Ala-Phe-hGlnR*3-PyrS2-3Thi-BztA-Lys*3-Ala-NH2 |
| I-186 | Ac-PL3-Asp-Npg-B5-Asp-3COOHF-Ala-Ala-Phe-hGlnR*3-PyrS2-2F3MeF-BztA-Lys*3-Ala- |
| | NH2 |
| I-187 | Ac-PL3-Asp-Npg-B5-Asp-3COOHF-Ala-Ala-Phe-iPrLys*3-PyrS2-3Thi-BztA-hGlnR*3-Ala- |
| | NH2 |
| I-188 | Ac-PL3-Asp-Npg-B5-Asp-3COOHF-Ala-Ala-Phe-iPrLys*3-PyrS2-2F3MeF-BztA-hGlnR*3-Ala- |
| | NH2 |
| I-189 | Ac-PL3-Asp-Npg-B5-Asp-3COOHF-Ala-Ala-Phe-hGlnR*3-PyrS2-2F3MeF-BztA-iPrLys*3-Ala- |
| | NH2 |
| I-190 | Ac-PL3-Asp-Npg-B5-Asp-3COOHF-Ala-Ala-Phe-iPrLys*3-PyrS2-3Thi-BztA-GlnR*3-Ala-NH2 |
| I-191 | Ac-PL3-Asp-Npg-B5-Asp-3COOHF-Ala-Ala-Phe-iPrLys*3-PyrS2-2F3MeF-BztA-GlnR*3-Ala- |
| | NH2 |
| I-192 | Ac-PL3-Asp-Npg-B5-Asp-3COOHF-Ala-Ala-Phe-GlnR*3-PyrS2-2F3MeF-BztA-iPrLys*3-Ala- |
| | NH2 |
| I-193 | Ac-PL3-Asp-Npg-B5-Asp-20H3COOHF-Aib-Ala-Phe-Lys*3-PyrS2-2F3MeF-BztA-GlnR*3-Ala- |
| | NH2 |
| I-194 | Ac-PL3-Asp-Npg-B5-Asp-40H3COOHF-Aib-Ala-Phe-Lys*3-PyrS2-2F3MeF-BztA-GlnR*3-Ala- |
| | NH2 |
| I-195 | Ac-PL3-Asp-Npg-B5-Asp-[CH2CMe2CO2H]TriAzDap-Aib-Ala-Phe-Lys*3-PyrS2-2F3MeF- |
| | BztA-GlnR*3-Ala-NH2 |
| I-196 | Ac-PL3-Asp-Npg-B5-Asp-4COOHF-Aib-Ala-Phe-Lys*3-PyrS2-2F3MeF-BztA-GlnR*3-Ala-NH2 |
| I-197 | Ac-PL3-Asp-Npg-B5-Asp-2COOHF-Aib-Ala-Phe-Lys*3-PyrS2-2F3MeF-BztA-GlnR*3-Ala-NH2 |
| I-198 | Ac-PL3-Asp-Npg-B5-Asp-Glu-Aib-Ala-Phe-Lys*3-PyrS2-2F3MeF-BztA-GlnR*3-Ala-NH2 |
| I-199 | Ac-PL3-Asp-Npg-B5-Asp-Asp-Aib-Ala-Phe-Lys*3-PyrS2-2F3MeF-BztA-GlnR*3-Ala-NH2 |
| I-200 | Ac-PL3-Asp-Npg-B5-Asp-Thr-Aib-Ala-Phe-Lys*3-PyrS2-2F3MeF-BztA-GlnR*3-Ala-NH2 |
| I-201 | Ac-PL3-Asp-Npg-B5-Asp-Gln-Aib-Ala-Phe-Lys*3-PyrS2-2F3MeF-BztA-GlnR*3-Ala-NH2 |
| I-202 | Ac-PL3-Asp-Npg-B5-Asp-His-Aib-Ala-Phe-Lys*3-PyrS2-2F3MeF-BztA-GlnR*3-Ala-NH2 |
| I-203 | Ac-PL3-Asp-Npg-B5-Asp-Tyr-Aib-Ala-Phe-Lys*3-PyrS2-2F3MeF-BztA-GlnR*3-Ala-NH2 |
| I-204 | Ac-PL3-Asp-Npg-B5-Asp-5F3Me2COOHF-Aib-Ala-Phe-Lys*3-PyrS2-2F3MeF-BztA-GlnR*3- |
| | Ala-NH2 |
| I-205 | Ac-PL3-Asp-Npg-B5-Asp-4F3Me2COOHF-Aib-Ala-Phe-Lys*3-PyrS2-2F3MeF-BztA-GlnR*3- |
| | Ala-NH2 |
| I-206 | Ac-PL3-Asp-Npg-B5-Asp-5F3Me3COOHF-Aib-Ala-Phe-Lys*3-PyrS2-2F3MeF-BztA-GlnR*3- |
| | Ala-NH2 |
| I-207 | Ac-PL3-Asp-Npg-B5-Asp-4F3Me3COOHF-Aib-Ala-Phe-Lys*3-PyrS2-2F3MeF-BztA-GlnR*3- |
| | Ala-NH2 |
| I-208 | Ac-PL3-Asp-Npg-B5-Asp-3F2COOHF-Aib-Ala-Phe-Lys*3-PyrS2-2F3MeF-BztA-GlnR*3-Ala- |
| | NH2 |
| I-209 | Ac-PL3-Asp-Npg-B5-Asp-Val-Aib-Ala-Phe-Lys*3-PyrS2-2F3MeF-BztA-GlnR*3-Ala-NH2 |
| I-210 | Ac-PL3-Asp-Npg-B5-Asp-Ser-Aib-Ala-Phe-Lys*3-PyrS2-2F3MeF-BztA-GlnR*3-Ala-NH2 |
| I-211 | Ac-PL3-Asp-Npg-B5-Asp-Trp-Aib-Ala-Phe-Lys*3-PyrS2-2F3MeF-BztA-GlnR*3-Ala-NH2 |
| I-212 | Ac-PL3-Asp-Npg-B5-Asp-Asn-Aib-Ala-Phe-Lys*3-PyrS2-2F3MeF-BztA-GlnR*3-Ala-NH2 |
| I-213 | Ac-PL3-Asp-Npg-B5-Asp-Ala-Aib-Ala-Phe-Lys*3-PyrS2-2F3MeF-BztA-GlnR*3-Ala-NH2 |
| I-214 | Ac-PL3-Asp-Npg-B5-Asp-Arg-Aib-Ala-Phe-Lys*3-PyrS2-2F3MeF-BztA-GlnR*3-Ala-NH2 |
| I-215 | Ac-PL3-Asp-Npg-B5-Asp-dGlu-Aib-Ala-Phe-Lys*3-PyrS2-2F3MeF-BztA-GlnR*3-Ala-NH2 |
| I-216 | Ac-PL3-Asp-Npg-B5-Asp-aThr-Aib-Ala-Phe-Lys*3-PyrS2-2F3MeF-BztA-GlnR*3-Ala-NH2 |
| I-217 | Ac-PL3-Asp-Npg-B5-Asp-hTyr-Aib-Ala-Phe-Lys*3-PyrS2-2F3MeF-BztA-GlnR*3-Ala-NH2 |
| I-218 | Ac-PL3-Asp-Npg-B5-Asp-3cbmf-Aib-Ala-Phe-Lys*3-PyrS2-2F3MeF-BztA-GlnR*3-Ala-NH2 |
| I-219 | Ac-PL3-Asp-Npg-B5-Asp-Leu-Aib-Ala-Phe-Lys*3-PyrS2-2F3MeF-BztA-GlnR*3-Ala-NH2 |
| I-220 | Ac-PL3-Asp-Npg-B5-Asp-Phe-Aib-Ala-Phe-Lys*3-PyrS2-2F3MeF-BztA-GlnR*3-Ala-NH2 |
| I-221 | Ac-PL3-Asp-Npg-B5-Asp-Lys-Aib-Ala-Phe-Lys*3-PyrS2-2F3MeF-BztA-GlnR*3-Ala-NH2 |
| I-222 | Ac-PL3-Asp-Npg-B5-Asp-Ile-Aib-Ala-Phe-Lys*3-PyrS2-2F3MeF-BztA-GlnR*3-Ala-NH2 |
| I-223 | Ac-PL3-Asp-Npg-B5-Asp-3COOHF-Aib-Ala-Phe-Lys*3-PyrS2-2F3MeF-BztA-GlnR*3-Ala- |
| | Serol |
| I-224 | Ac-PL3-Asp-Npg-B5-Asp-3COOHF-Aib-Ala-Phe-Lys*3-PyrS2-2F3MeF-BztA-GlnR*3- |
| | MorphNva-Serol |
| I-225 | Ac-PL3-Asp-Npg-B5-Asp-3COOHF-Aib-Ala-Phe-Lys*3-PyrS2-2F3MeF-BztA-GlnR*3- |
| | MorphNva-dAlaol |
| I-226 | Ac-PL3-Asp-Npg-B5-Asp-3COOHF-Aib-Ala-Phe-Lys*3-PyrS2-2F3MeF-BztA-GlnR*3-Ala- |
| | NHEt |
| I-227 | Ac-PL3-Asp-Npg-B5-Asp-3COOHF-Aib-Ala-Phe-Lys*3-PyrS2-2F3MeF-BztA-GlnR*3-Ala-Ser- |
| | NHEt |
| I-228 | Ac-PL3-Asp-Npg-B5-Asp-3COOHF-Aib-Ala-Phe-Lys*3-PyrS2-2F3MeF-BztA-GlnR*3- |
| | MorphNva-NHEt |
| I-229 | Ac-PL3-Asp-Npg-B5-Asp-3COOHF-Aib-Ala-Phe-Lys*3-PyrS2-2F3MeF-BztA-GlnR*3- |
| | MorphNva-Ser-NHEt |
| I-230 | Ac-PL3-Asp-Npg-B5-Asp-3COOHF-Aib-Ala-Phe-Lys*3-PyrS2-2F3MeF-BztA-GlnR*3-Ala-Ser- |
| | NH2 |
| I-231 | Ac-PL3-Asp-Npg-B5-Asp-3COOHF-Aib-Ala-Phe-Lys*3-PyrS2-2F3MeF-BztA-GlnR*3- |
| | MorphNva-NH2 |
| I-232 | Ac-PL3-Asp-Npg-B5-Asp-3COOHF-Aib-Ala-Phe-Lys*3-PyrS2-2F3MeF-BztA-GlnR*3- |
| | MorphNva-Ser-NH2 |
| I-233 | Ac-MePro-Asp-Npg-R4-Asp-3COOHF-Aib-Ala-Phe-Lys*3-PyrS2-3Thi-BztA-GlnR*3-Ala-NH2 |
| I-234 | Ac-MePro-Asp-Npg-R5-Asp-3COOHF-Aib-Ala-Phe-Lys*3-PyrS2-3Thi-BztA-GlnR*3-Ala-NH2 |
| I-235 | Ac-MePro-Asp-Npg-R6-Asp-3COOHF-Aib-Ala-Phe-Lys*3-PyrS2-3Thi-BztA-GlnR*3-Ala-NH2 |
| I-236 | Ac-MePro-Asp-Npg-R5-Asp-3COOHF-Ala-Ala-Phe-Lys*3-PyrS2-3Thi-BztA-GlnR*3-Ala-NH2 |
| I-237 | Ac-MePro-Asp-Val-R5-Asp-3COOHF-Aib-Ala-Phe-Lys*3-PyrS2-3Thi-BztA-GlnR*3-Ala-NH2 |
| I-238 | Ac-MePro-Asp-nLeu-R5-Asp-3COOHF-Aib-Ala-Phe-Lys*3-PyrS2-3Thi-BztA-GlnR*3-Ala-NH2 |
| I-239 | Ac-MePro-Asp-Npg-R4-Asp-TfeGA-Aib-Ala-Phe-Lys*3-PyrS2-3Thi-BztA-GlnR*3-Ala-NH2 |
| I-240 | Ac-MePro-Asp-Npg-R5-Asp-TfeGA-Aib-Ala-Phe-Lys*3-PyrS2-3Thi-BztA-GlnR*3-Ala-NH2 |
| I-241 | Ac-MePro-Asp-Npg-R6-Asp-TfeGA-Aib-Ala-Phe-Lys*3-PyrS2-3Thi-BztA-GlnR*3-Ala-NH2 |
| I-242 | Ac-MePro-Asp-Npg-R5-Asp-TfeGA-Ala-Ala-Phe-Lys*3-PyrS2-3Thi-BztA-GlnR*3-Ala-NH2 |
| I-243 | Ac-MePro-Asp-Val-R5-Asp-TfeGA-Aib-Ala-Phe-Lys*3-PyrS2-3Thi-BztA-GlnR*3-Ala-NH2 |
| I-244 | Ac-MePro-Asp-nLeu-R5-Asp-TfeGA-Aib-Ala-Phe-Lys*3-PyrS2-3Thi-BztA-GlnR*3-Ala-NH2 |
| I-245 | Ac-PL3-Asp-nLeu-B5-Asp-3COOHF-Aib-Ala-Phe-Lys*3-PyrS2-3Thi-BztA-GlnR*3-Ala-NH2 |
| I-246 | Ac-PL3-Asp-Leu-B5-Asp-3COOHF-Aib-Ala-Phe-Lys*3-PyrS2-3Thi-BztA-GlnR*3-Ala-NH2 |
| I-247 | Ac-PL3-Asp-Ile-B5-Asp-3COOHF-Aib-Ala-Phe-Lys*3-PyrS2-3Thi-BztA-GlnR*3-Ala-NH2 |
| I-248 | Ac-PL3-Asp-Val-B5-Asp-3COOHF-Aib-Ala-Phe-Lys*3-PyrS2-3Thi-BztA-GlnR*3-Ala-NH2 |
| I-249 | Ac-PL3-Asp-Phe-B5-Asp-3COOHF-Aib-Ala-Phe-Lys*3-PyrS2-3Thi-BztA-GlnR*3-Ala-NH2 |
| I-250 | Ac-PL3-Asp-Cha-B5-Asp-3COOHF-Aib-Ala-Phe-Lys*3-PyrS2-3Thi-BztA-GlnR*3-Ala-NH2 |
| I-251 | Ac-PL3-Asp-CypA-B5-Asp-3COOHF-Aib-Ala-Phe-Lys*3-PyrS2-3Thi-BztA-GlnR*3-Ala-NH2 |
| I-252 | Ac-PL3-Asp-CyLeu-B5-Asp-3COOHF-Aib-Ala-Phe-Lys*3-PyrS2-3Thi-BztA-GlnR*3-Ala-NH2 |
| I-253 | Ac-PL3-Asp-Chg-B5-Asp-3COOHF-Aib-Ala-Phe-Lys*3-PyrS2-3Thi-BztA-GlnR*3-Ala-NH2 |
| I-254 | Ac-PL3-Asp-Pff-B5-Asp-3COOHF-Aib-Ala-Phe-Lys*3-PyrS2-3Thi-BztA-GlnR*3-Ala-NH2 |
| I-255 | Ac-PL3-Asp-DiethA-B5-Asp-3COOHF-Aib-Ala-Phe-Lys*3-PyrS2-3Thi-BztA-GlnR*3-Ala-NH2 |
| I-256 | Ac-PL3-Asp-Npg-B5-Asp-3COOHF-Ala-Ala-Phe-4PipA*3-PyrS2-3Thi-BztA-GlnR*3-Ala-NH2 |
| I-257 | Ac-PL3-Asp-Npg-B5-Asp-3COOHF-Ala-Ala-Phe-4PipA*3-PyrS2-2F3MeF-BztA-GlnR*3-Ala- |
| | NH2 |
| I-258 | Ac-PL3-Asp-Npg-B5-Asp-3COOHF-Ala-Ala-Phe-GlnR*3-PyrS2-3Thi-BztA-4PipA*3-Ala-NH2 |
| I-259 | Ac-PL3-Asp-Npg-B5-Asp-3COOHF-Ala-Ala-Phe-GlnR*3-PyrS2-2F3MeF-BztA-4PipA*3-Ala- |
| | NH2 |
| I-260 | Ac-PL3-Asp-Npg-B5-Asp-3COOHF-Ala-Ala-Phe-hGlnR*3-PyrS2-3Thi-BztA-4PipA*3-Ala-NH2 |
| I-261 | Ac-PL3-Asp-Npg-B5-Asp-3COOHF-Ala-Ala-Phe-hGlnR*3-PyrS2-2F3MeF-BztA-4PipA*3-Ala- |
| | NH2 |
| I-262 | Ac-PL3-Asp-Npg-B5-Asp-3COOHF-Aib-Ala-Phe-TriAzLys*3-PyrS2-3Thi-BztA-sCH2S*3-Ala- |
| | NH2 |
| I-263 | Ac-PL3-Asp-Npg-B5-Asp-3COOHF-Aib-Ala-Phe-sCH2S*3-PyrS2-3Thi-BztA-TriAzLys*3-Ala- |
| | NH2 |
| I-264 | Ac-PL3-Asp-Npg-B5-Asp-3COOHF-Ala-Ala-Phe-TriAzLys*3-PyrS2-3Thi-BztA-sCH2S*3-Ala- |
| | NH2 |
| I-265 | Ac-PL3-Asp-Npg-B5-Asp-3COOHF-Ala-Ala-Phe-sCH2S*3-PyrS2-3Thi-BztA-TriAzLys*3-Ala- |
| | NH2 |
| I-266 | Ac-PL3-Asp-Npg-B5-Asp-3COOHF-Aib-Ala-Phe-Lys*3-PyrS2-Ala-BztA-GlnR*3-Ala-NH2 |
| I-267 | Ac-PL3-Asp-Npg-B5-Asp-3COOHF-Aib-Ala-Phe-Lys*3-PyrS2-Ala-BztA-GlnR*3-Ala-NH2 |
| I-268 | Ac-PL3-Asp-Npg-B5-Asp-3COOHF-Aib-Ala-Phe-Lys*3-PyrS2-Abu-BztA-GlnR*3-Ala-NH2 |
| I-269 | Ac-PL3-Asp-Npg-B5-Asp-3COOHF-Aib-Ala-Phe-Lys*3-PyrS2-Abu-BztA-GlnR*3-Ala-NH2 |
| I-270 | Ac-PL3-Asp-Npg-B5-Asp-3COOHF-Aib-Ala-Phe-Lys*3-PyrS2-Nva-BztA-GlnR*3-Ala-NH2 |
| I-271 | Ac-PL3-Asp-Npg-B5-Asp-3COOHF-Aib-Ala-Phe-Lys*3-PyrS2-nLeu-BztA-GlnR*3-Ala-NH2 |
| I-272 | Ac-PL3-Asp-Npg-B5-Asp-3COOHF-Aib-Ala-Phe-Lys*3-PyrS2-nLeu-BztA-GlnR*3-Ala-NH2 |
| I-273 | Ac-PL3-Asp-Npg-B5-Asp-3COOHF-Aib-Ala-Phe-Lys*3-PyrS2-Leu-BztA-GlnR*3-Ala-NH2 |
| I-274 | Ac-PL3-Asp-Npg-B5-Asp-3COOHF-Aib-Ala-Phe-Lys*3-PyrS2-Leu-BztA-GlnR*3-Ala-NH2 |
| I-275 | Ac-PL3-Asp-Npg-B5-Asp-3COOHF-Aib-Ala-Phe-Lys*3-PyrS2-hLeu-BztA-GlnR*3-Ala-NH2 |
| I-276 | Ac-PL3-Asp-Npg-B5-Asp-3COOHF-Aib-Ala-Phe-Lys*3-PyrS2-hLeu-BztA-GlnR*3-Ala-NH2 |
| I-277 | Ac-PL3-Asp-Npg-B5-Asp-3COOHF-Aib-Ala-Phe-Lys*3-PyrS2-Npg-BztA-GlnR*3-Ala-NH2 |
| I-278 | Ac-PL3-Asp-Npg-B5-Asp-3COOHF-Aib-Ala-Phe-Lys*3-PyrS2-Npg-BztA-GlnR*3-Ala-NH2 |
| I-279 | Ac-PL3-Asp-Npg-B5-Asp-3COOHF-Aib-Ala-Phe-Lys*3-PyrS2-Phe-BztA-GlnR*3-Ala-NH2 |
| I-280 | Ac-PL3-Asp-Npg-B5-Asp-3COOHF-Aib-Ala-Phe-Lys*3-PyrS2-Phe-BztA-GlnR*3-Ala-NH2 |
| I-281 | Ac-PL3-Asp-Npg-B5-Asp-3COOHF-Aib-Ala-Phe-Lys*3-PyrS2-Cpa-BztA-GlnR*3-Ala-NH2 |
| I-282 | Ac-PL3-Asp-Npg-B5-Asp-3COOHF-Aib-Ala-Phe-Lys*3-PyrS2-Cpa-BztA-GlnR*3-Ala-NH2 |
| I-283 | Ac-PL3-Asp-Npg-B5-Asp-3COOHF-Aib-Ala-Phe-Lys*3-PyrS2-Cba-BztA-GlnR*3-Ala-NH2 |
| I-284 | Ac-PL3-Asp-Npg-B5-Asp-3COOHF-Aib-Ala-Phe-Lys*3-PyrS2-CypA-BztA-GlnR*3-Ala-NH2 |
| I-285 | Ac-PL3-Asp-Npg-B5-Asp-3COOHF-Aib-Ala-Phe-Lys*3-PyrS2-ChA-BztA-GlnR*3-Ala-NH2 |
| I-286 | Ac-PL3-Asp-Npg-B5-SbMeAsp-3COOHF-Aib-Ala-Phe-Lys*3-PyrS2-2F3MeF-BztA-GlnR*3- |
| | Ala-NH2 |
| I-287 | Ac-PL3-Asp-Npg-B5-RbMeAsp-3COOHF-Aib-Ala-Phe-Lys*3-PyrS2-2F3MeF-BztA-GlnR*3- |
| | Ala-NH2 |
| I-288 | Ac-PL3-SbMeAsp-Npg-B5-Asp-3COOHF-Aib-Ala-Phe-Lys*3-PyrS2-2F3MeF-BztA-GlnR*3- |
| | Ala-NH2 |
| I-289 | Ac-PL3-RbMeAsp-Npg-B5-Asp-3COOHF-Aib-Ala-Phe-Lys*3-PyrS2-2F3MeF-BztA-GlnR*3- |
| | Ala-NH2 |
| I-290 | Ac-PL3-aMeDAsp-Npg-B5-Asp-3COOHF-Aib-Ala-Phe-Lys*3-PyrS2-2F3MeF-BztA-GlnR*3- |
| | Ala-NH2 |
| I-291 | Ac-PL3-Glu-Npg-B5-Glu-3COOHF-Aib-Ala-Phe-Lys*3-PyrS2-2F3MeF-BztA-GlnR*3-Ala-NH2 |
| I-292 | Ac-PL3-Asp-Npg-B5-Asp-3COOHF-Aib-Ala-Phe-Lys*3-PyrS2-2FurA-BztA-GlnR*3-Ala-NH2 |
| I-293 | Ac-PL3-Asp-Npg-B5-Asp-3COOHF-Aib-Ala-Phe-Lys*3-PyrS2-20MeF-BztA-GlnR*3-Ala-NH2 |
| I-294 | Ac-PL3-Asp-Npg-B5-Asp-3COOHF-Aib-Ala-Phe-Lys*3-PyrS2-2MeF-BztA-GlnR*3-Ala-NH2 |
| I-295 | Ac-PL3-Asp-Npg-B5-Asp-3COOHF-Aib-Ala-Phe-Lys*3-PyrS2-2BrF-BztA-GlnR*3-Ala-NH2 |
| I-296 | Ac-PL3-Asp-Npg-B5-Asp-3COOHF-Aib-Ala-Phe-Lys*3-PyrS2-2ClF-BztA-GlnR*3-Ala-NH2 |
| I-297 | Ac-PL3-Asp-Npg-B5-Asp-3COOHF-Aib-Ala-Phe-Lys*3-PyrS2-2CNF-BztA-GlnR*3-Ala-NH2 |
| I-298 | Ac-PL3-Asp-Npg-B5-Asp-3COOHF-Aib-Ala-Phe-Lys*3-PyrS2-2NO2F-BztA-GlnR*3-Ala-NH2 |
| I-299 | Ac-PL3-Asp-Npg-B5-Asp-3COOHF-Aib-Ala-Phe-Lys*3-PyrS2-2PyrA-BztA-GlnR*3-Ala-NH2 |
| I-300 | Ac-PL3-Asp-Npg-B5-Asp-3COOHF-Aib-Ala-Phe-Lys*3-PyrS2-3PyrA-BztA-GlnR*3-Ala-NH2 |
| I-301 | Ac-PL3-Asp-Npg-B5-Asp-3COOHF-Aib-Ala-Phe-Lys*3-PyrS2-4PyrA-BztA-GlnR*3-Ala-NH2 |
| I-302 | Ac-PL3-Asp-Npg-B5-Asp-3COOHF-Aib-Ala-Phe-Lys*3-PyrS2-His-BztA-GlnR*3-Ala-NH2 |
| I-303 | Ac-PL3-Asp-Npg-B5-Asp-3COOHF-Aib-Ala-Phe-Lys*3-PyrS2-2F3MeF-BztA-GlnR*3- |
| | [BiotinPEG8]Lys-NH2 |
| I-304 | Ac-PL3-Asp-Ala-B5-Asp-3COOHF-Aib-Ala-Phe-Lys*3-PyrS2-3Thi-BztA-GlnR*3-Ala-NH2 |
| I-305 | Ac-PL3-Asp-Tyr-B5-Asp-3COOHF-Aib-Ala-Phe-Lys*3-PyrS2-3Thi-BztA-GlnR*3-Ala-NH2 |
| I-306 | Ac-PL3-Asp-Trp-B5-Asp-3COOHF-Aib-Ala-Phe-Lys*3-PyrS2-3Thi-BztA-GlnR*3-Ala-NH2 |
| I-307 | Ac-PL3-Asp-Ser-B5-Asp-3COOHF-Aib-Ala-Phe-Lys*3-PyrS2-3Thi-BztA-GlnR*3-Ala-NH2 |
| I-308 | Ac-PL3-Asp-Aib-B5-Asp-3COOHF-Aib-Ala-Phe-Lys*3-PyrS2-3Thi-BztA-GlnR*3-Ala-NH2 |
| I-309 | Ac-PL3-Asp-Phg-B5-Asp-3COOHF-Aib-Ala-Phe-Lys*3-PyrS2-3Thi-BztA-GlnR*3-Ala-NH2 |
| I-310 | Ac-PL3-Asp-DipA-B5-Asp-3COOHF-Aib-Ala-Phe-Lys*3-PyrS2-3Thi-BztA-GlnR*3-Ala-NH2 |
| I-311 | Ac-PL3-Asp-OctG-B5-Asp-3COOHF-Aib-Ala-Phe-Lys*3-PyrS2-3Thi-BztA-GlnR*3-Ala-NH2 |
| I-312 | Ac-PL3-Asp-Cba-B5-Asp-3COOHF-Aib-Ala-Phe-Lys*3-PyrS2-3Thi-BztA-GlnR*3-Ala-NH2 |
| I-313 | Ac-PL3-Asp-MorphNva-B5-Asp-3COOHF-Aib-Ala-Phe-Lys*3-PyrS2-3Thi-BztA-GlnR*3-Ala- |
| | NH2 |
| I-314 | Ac-PL3-Asp-F2PipNva-B5-Asp-3COOHF-Aib-Ala-Phe-Lys*3-PyrS2-3Thi-BztA-GlnR*3-Ala- |
| | NH2 |
| I-315 | Ac-PL3-Asn-Npg-B5-Asp-[CH2CMe2CO2H]TriAzDap-Aib-Ala-Phe-Lys*3-PyrS2-3Thi-BztA- |
| | GlnR*3-Ala-NH2 |
| I-316 | Ac-PL3-Ser-Npg-B5-Asp-[CH2CMe2CO2H]TriAzDap-Aib-Ala-Phe-Lys*3-PyrS2-3Thi-BztA- |
| | GlnR*3-Ala-NH2 |
| I-317 | Ac-PL3-aThr-Npg-B5-Asp-[CH2CMe2CO2H]TriAzDap-Aib-Ala-Phe-Lys*3-PyrS2-3Thi-BztA- |
| | GlnR*3-Ala-NH2 |
| I-318 | Ac-PL3-Asp-Npg-B5-Asn-[CH2CMe2CO2H]TriAzDap-Aib-Ala-Phe-Lys*3-PyrS2-3Thi-BztA- |
| | GlnR*3-Ala-NH2 |
| I-319 | Ac-PL3-Asn-Npg-B5-Asp-[CH2CMe2CO2H]TriAzDap-MorphGln-Ala-Phe-Lys*3-PyrS2-3Thi- |
| | BztA-GlnR*3-Ala-NH2 |
| I-320 | Ac-PL3-Ser-Npg-B5-Asp-[CH2CMe2CO2H]TriAzDap-MorphGln-Ala-Phe-Lys*3-PyrS2-3Thi- |
| | BztA-GlnR*3-Ala-NH2 |
| I-321 | Ac-PL3-aThr-Npg-B5-Asp-[CH2CMe2CO2H]TriAzDap-MorphGln-Ala-Phe-Lys*3-PyrS2-3Thi- |
| | BztA-GlnR*3-Ala-NH2 |
| I-322 | Ac-PL3-Asp-Npg-B5-Asn-[CH2CMe2CO2H]TriAzDap-MorphGln-Ala-Phe-Lys*3-PyrS2-3Thi- |
| | BztA-GlnR*3-Ala-NH2 |
| I-323 | Ac-PL3-Asn-Npg-B5-Asp-3COOHF-MorphGln-Ala-Phe-Lys*3-PyrS2-3Thi-BztA-GlnR*3-Ala- |
| | NH2 |
| I-324 | Ac-PL3-Ser-Npg-B5-Asp-3COOHF-MorphGln-Ala-Phe-Lys*3-PyrS2-3Thi-BztA-GlnR*3-Ala- |
| | NH2 |
| I-325 | Ac-PL3-aThr-Npg-B5-Asp-3COOHF-MorphGln-Ala-Phe-Lys*3-PyrS2-3Thi-BztA-GlnR*3-Ala- |
| | NH2 |
| I-326 | Ac-PL3-Asp-Npg-B5-Asn-3COOHF-MorphGln-Ala-Phe-Lys*3-PyrS2-3Thi-BztA-GlnR*3-Ala- |
| | NH2 |
| I-327 | Ac-PL3-Asp-Npg-B5-Asp-3COOHF-Aib-Ala-Phe-Lys*3-PyrS2-2F3MeF-34ClF-GlnR*3-Ala- |
| | NH2 |
| I-328 | Ac-PL3-Asp-Npg-B5-Asp-3COOHF-Aib-Ala-Phe-Lys*3-PyrS2-3Thi-34ClF-GlnR*3-Ala-NH2 |
| I-329 | Ac-PL3-Asp-Npg-B5-Asp-3COOHF-Aib-Ala-Phe-Lys*3-PyrS2-Phe-34ClF-GlnR*3-Ala-NH2 |
| I-330 | Ac-PL3-Asp-Npg-B5-Asp-3COOHF-Aib-Ala-Phe-Lys*3-PyrS2-2F3MeF-34MeF-GlnR*3-Ala- |
| | NH2 |
| I-331 | Ac-PL3-Asp-Npg-B5-Asp-3COOHF-Aib-Ala-Phe-Lys*3-PyrS2-2F3MeF-3BrF-GlnR*3-Ala-NH2 |
| I-332 | Ac-PL3-Asp-Npg-B5-Asp-3COOHF-Aib-Ala-Phe-Lys*3-PyrS2-3Thi-3BrF-GlnR*3-Ala-NH2 |
| I-333 | Ac-PL3-Asp-Npg-B5-Asp-3COOHF-Aib-Ala-Phe-Lys*3-PyrS2-Phe-3BrF-GlnR*3-Ala-NH2 |
| I-334 | Ac-PL3-Asp-Npg-B5-Asp-3COOHF-Aib-Ala-Phe-Lys*3-PyrS2-1NapA-BztA-GlnR*3-Ala-NH2 |
| I-335 | Ac-PL3-Asp-Npg-B5-Asp-3COOHF-Aib-Ala-Phe-TriAzLys*3-PyrS2-3Thi-BztA-sAla*3-Ala- |
| | NH2 |
| I-336 | Ac-PL3-Asp-Npg-B5-Asp-3COOHF-Aib-Ala-Phe-sAla*3-PyrS2-3Thi-BztA-TriAzLys*3-Ala- |
| | NH2 |
| I-337 | Ac-PL3-Asp-Npg-B5-Asp-3COOHF-Ala-Ala-Phe-TriAzLys*3-PyrS2-3Thi-BztA-sAla*3-Ala- |
| | NH2 |
| I-338 | Ac-PL3-Asp-Npg-B5-Asp-3COOHF-Ala-Ala-Phe-sAla*3-PyrS2-3Thi-BztA-TriAzLys*3-Ala- |
| | NH2 |
| I-339 | Ac-PL3-Asp-Npg-B5-Asp-3COOHF-Aib-Ala-Phe-[4FB]Cys-PyrS2-2F3MeF-BztA-Cys-Ala-NH2 |
| I-340 | Ac-PL3-Asp-Npg-B5-Asp-3COOHF-Aib-Ala-Phe-[8FBB]Cys-PyrS2-2F3MeF-BztA-Cys-Ala- |
| | NH2 |
| I-341 | Ac-PL3-Asp-Npg-B5-Asp-3COOHF-Aib-Ala-Phe-[8FBB]Cys-PyrS2-2F3MeF-BztA-Cys-Ala- |
| | NH2 |
| I-342 | Ac-PL3-Asp-Npg-B5-Asp-3COOHF-Aib-Ala-Phe-Lys*3-PyrS2-3Thi-BztA-GlnR*3-Glu-Ala- |
| | NH2 |
| I-343 | Ac-PL3-Asp-Npg-B5-Asp-3COOHF-Aib-Ala-Phe-Lys*3-PyrS2-3Thi-BztA-GlnR*3-Ala-Glu- |
| | Ala-NH2 |
| I-344 | Ac-PL3-Asp-Npg-B5-Asp-3COOHF-Aib-Ala-Phe-Lys*3-PyrS2-2COOHF-BztA-GlnR*3-Ala- |
| | NH2 |
| I-345 | Ac-PL3-Asp-Npg-B5-Asp-3COOHF-Aib-Ala-3COOHF-Lys*3-PyrS2-3Thi-BztA-GlnR*3-Ala- |
| | NH2 |
| I-346 | Ac-PL3-Asp-Npg-B5-Asp-3COOHF-Aib-Ala-3COOHF-Lys*3-PyrS2-2COOHF-BztA-GlnR*3- |
| | Ala-NH2 |
| I-347 | Ac-PL3-Asp-Npg-B5-Asp-3COOHF-Aib-Ala-3COOHF-Lys*3-PyrS2-2COOHF-BztA-GlnR*3- |
| | Ala-Glu-Ala-NH2 |
| I-348 | Ac-PL3-Asp-Npg-B5-Asp-3COOHF-Aib-Ala-Phe-Lys*3-PyrS2-3Thi-BztA-GlnR*3-Glu-Ala-OH |
| I-349 | Ac-PL3-Asp-Npg-B5-Asp-3COOHF-Aib-Ala-Phe-Lys*3-PyrS2-2COOHF-BztA-GlnR*3-Ala-OH |
| I-350 | Ac-PL3-Asp-Npg-B5-Asp-3COOHF-Aib-Ala-3COOHF-Lys*3-PyrS2-3Thi-BztA-GlnR*3-Ala- |
| | OH |
| I-351 | Ac-PL3-Asp-Npg-B5-Asp-3COOHF-Aib-Ala-3COOHF-Lys*3-PyrS2-2COOHF-BztA-GlnR*3- |
| | Ala-OH |
| I-352 | Ac-PL3-Asp-Npg-B5-Asp-3COOHF-Aib-Ala-3COOHF-Lys*3-PyrS2-2COOHF-BztA-GlnR*3- |
| | Ala-Glu-Ala-OH |
| I-353 | Ac-PL3-Asp-Npg-B5-Asp-3COOHF-Aib-Ala-Cba-Lys*3-PyrS2-3Thi-BztA-GlnR*3-Ala-NH2 |
| I-354 | Ac-PL3-Asp-Npg-B5-Asp-3COOHF-Aib-Ala-CypA-Lys*3-PyrS2-3Thi-BztA-GlnR*3-Ala-NH2 |
| I-355 | Ac-PL3-Asp-Npg-B5-Asp-3COOHF-Aib-Ala-BztA-Lys*3-PyrS2-3Thi-BztA-GlnR*3-Ala-NH2 |
| I-356 | Ac-PL3-Asp-Npg-B5-Asp-3COOHF-Aib-Ala-1NapA-Lys*3-PyrS2-3Thi-BztA-GlnR*3-Ala-NH2 |
| I-357 | Ac-PL3-Asp-Npg-B5-Asp-3COOHF-Aib-Ala-2NapA-Lys*3-PyrS2-3Thi-BztA-GlnR*3-Ala-NH2 |
| I-358 | Ac-PL3-Asp-Npg-B5-Asp-3COOHF-Aib-Ala-Tyr-Lys*3-PyrS2-3Thi-BztA-GlnR*3-Ala-NH2 |
| I-359 | Ac-PL3-Asp-Npg-B5-Asp-3COOHF-Aib-Ala-Trp-Lys*3-PyrS2-3Thi-BztA-GlnR*3-Ala-NH2 |
| I-360 | Ac-PL3-Asp-Npg-B5-Asp-3COOHF-Aib-Ala-Leu-Lys*3-PyrS2-3Thi-BztA-GlnR*3-Ala-NH2 |
| I-361 | Ac-PL3-Asp-Npg-B5-Asp-3COOHF-Aib-Ala-Ile-Lys*3-PyrS2-3Thi-BztA-GlnR*3-Ala-NH2 |
| I-362 | Ac-PL3-Asp-Npg-B5-Asp-3COOHF-Aib-Ala-nLeu-Lys*3-PyrS2-3Thi-BztA-GlnR*3-Ala-NH2 |
| I-363 | Ac-PL3-Asp-Npg-B5-Asp-3COOHF-Aib-Ala-Ser-Lys*3-PyrS2-3Thi-BztA-GlnR*3-Ala-NH2 |
| I-364 | Ac-PL3-Asp-Npg-B5-Asp-3COOHF-Aib-Ala-3Thi-Lys*3-PyrS2-3Thi-BztA-GlnR*3-Ala-NH2 |
| I-365 | Ac-PL3-Asp-Npg-B5-Asp-3COOHF-Aib-Ala-2Thi-Lys*3-PyrS2-3Thi-BztA-GlnR*3-Ala-NH2 |
| I-366 | Ac-PL3-Asp-Npg-B5-Asp-3COOHF-Aib-Ala-Chg-Lys*3-PyrS2-3Thi-BztA-GlnR*3-Ala-NH2 |
| I-367 | Ac-PL3-Asp-Npg-B5-Asp-3COOHF-Aib-Ala-Hse-Lys*3-PyrS2-3Thi-BztA-GlnR*3-Ala-NH2 |
| I-368 | Ac-PL3-Asp-Npg-B5-Asp-3COOHF-Aib-Ala-4TriA-Lys*3-PyrS2-3Thi-BztA-GlnR*3-Ala-NH2 |
| I-369 | Ac-PL3-Asp-Npg-B5-Asp-3COOHF-Aib-Ala-3F3MeF-Lys*3-PyrS2-3Thi-BztA-GlnR*3-Ala- |
| | NH2 |
| I-370 | Ac-PL3-Asp-Npg-B5-Asp-3COOHF-Aib-Ala-Thr-Lys*3-PyrS2-3Thi-BztA-GlnR*3-Ala-NH2 |
| I-371 | Ac-PL3-Asp-Npg-B5-Asp-3COOHF-Aib-Ala-His-Lys*3-PyrS2-3Thi-BztA-GlnR*3-Ala-NH2 |
| I-372 | Ac-PL3-Asp-Npg-B5-Asp-3COOHF-Aib-Ala-Val-Lys*3-PyrS2-3Thi-BztA-GlnR*3-Ala-NH2 |
| I-373 | Ac-PL3-Asp-Npg-B5-Asp-3COOHF-Aib-Ala-Asn-Lys*3-PyrS2-3Thi-BztA-GlnR*3-Ala-NH2 |
| I-374 | Ac-PL3-Asp-Npg-B5-Asp-3COOHF-Aib-Ala-Gln-Lys*3-PyrS2-3Thi-BztA-GlnR*3-Ala-NH2 |
| I-375 | Ac-PL3-Asp-Npg-B5-Asp-3COOHF-Aib-Ala-Phe-[mXyl]Cys-PyrS2-2F3MeF-BztA-Cys-Ala- |
| | NH2 |
| I-376 | Ac-PL3-Asp-Npg-B5-Asp-3COOHF-Aib-Ala-Phe-[oXyl]Cys-PyrS2-2F3MeF-BztA-Cys-Ala- |
| | NH2 |
| I-377 | Ac-PL3-Asp-Npg-B5-Asp-3COOHF-Aib-Ala-Phe-[pXyl]Cys-PyrS2-2F3MeF-BztA-Cys-Ala- |
| | NH2 |
| I-378 | Ac-PL3-Asp-Npg-B5-Asp-3COOHF-MorphGln-Ala-Phe-Lys*3-PyrS2-3Thi-BztA-GlnR*3-Ala- |
| | NH2 |
| I-379 | Ac-PL3-Asp-Npg-B5-Asp-3COOHF-Me2Gln-Ala-Phe-Lys*3-PyrS2-3Thi-BztA-GlnR*3-Ala- |
| | NH2 |
| I-380 | Ac-PL3-Asp-Npg-B5-Asp-3COOHF-Met20-Ala-Phe-Lys*3-PyrS2-3Thi-BztA-GlnR*3-Ala-NH2 |
| I-381 | Ac-PL3-Asp-Npg-B5-Asp-3COOHF-AcLys-Ala-Phe-Lys*3-PyrS2-3Thi-BztA-GlnR*3-Ala-NH2 |
| I-382 | Ac-PL3-Asp-Npg-B5-Asp-3COOHF-CyLeu-Ala-Phe-Lys*3-PyrS2-3Thi-BztA-GlnR*3-Ala-NH2 |
| I-383 | Ac-PL3-Asp-Npg-B5-Asp-3COOHF-CyLeu-Ala-Phe-Lys*3-PyrS2-3Thi-BztA-GlnR*3-Ala-NH2 |
| I-384 | Ac-PL3-Asp-Npg-B5-Asp-3COOHF-Acp-Ala-Phe-Lys*3-PyrS2-3Thi-BztA-GlnR*3-Ala-NH2 |
| I-385 | Ac-PL3-Asp-Npg-B5-Asp-3COOHF-Acp-Ala-Phe-Lys*3-PyrS2-3Thi-BztA-GlnR*3-Ala-NH2 |
| I-386 | Ac-PL3-Asp-Npg-B5-Asp-3COOHF-Phe-Ala-Phe-Lys*3-PyrS2-3Thi-BztA-GlnR*3-Ala-NH2 |
| I-387 | Ac-PL3-Asp-Npg-B5-Asp-3COOHF-His-Ala-Phe-Lys*3-PyrS2-3Thi-BztA-GlnR*3-Ala-NH2 |
| I-388 | Ac-PL3-Asp-Npg-B5-Asp-3COOHF-Val-Ala-Phe-Lys*3-PyrS2-3Thi-BztA-GlnR*3-Ala-NH2 |
| I-389 | Ac-PL3-Asp-Npg-B5-Asp-3COOHF-Ser-Ala-Phe-Lys*3-PyrS2-3Thi-BztA-GlnR*3-Ala-NH2 |
| I-390 | Ac-PL3-Asp-Npg-B5-Asp-3COOHF-Ser-Ala-Phe-Lys*3-PyrS2-3Thi-BztA-GlnR*3-Ala-NH2 |
| I-391 | Ac-PL3-Asp-Npg-B5-Asp-3COOHF-Gln-Ala-Phe-Lys*3-PyrS2-3Thi-BztA-GlnR*3-Ala-NH2 |
| I-392 | Ac-PL3-Asp-Npg-B5-Asp-3COOHF-Gln-Ala-Phe-Lys*3-PyrS2-3Thi-BztA-GlnR*3-Ala-NH2 |
| I-393 | Ac-PL3-Asp-Npg-B5-Asp-3COOHF-Asn-Ala-Phe-Lys*3-PyrS2-3Thi-BztA-GlnR*3-Ala-NH2 |
| I-394 | Ac-PL3-Asp-Npg-B5-Asp-3COOHF-Asn-Ala-Phe-Lys*3-PyrS2-3Thi-BztA-GlnR*3-Ala-NH2 |
| I-395 | Ac-PL3-Asp-Npg-B5-Asp-3COOHF-Aib-Ala-2Cpg-Lys*3-PyrS2-3Thi-BztA-GlnR*3-Ala-NH2 |
| I-396 | Ac-PL3-Asp-Npg-B5-Asp-3COOHF-Aib-Ala-Phe-Lys*3-PyrS2-3Thi-BztA-GlnR*3-Val-NH2 |
| I-397 | Ac-PL3-Asp-Npg-B5-Asp-3COOHF-Aib-Ala-Phe-Lys*3-PyrS2-3Thi-BztA-GlnR*3-Aib-NH2 |
| I-398 | Ac-PL3-Asp-Npg-B5-Asp-3COOHF-Aib-Ala-Phe-Lys*3-PyrS2-3Thi-BztA-GlnR*3-Thr-NH2 |
| I-399 | Ac-PL3-Asp-Npg-B5-Asp-3COOHF-Aib-Ala-Phe-Lys*3-PyrS2-3Thi-BztA-GlnR*3-Val-Ser- |
| | NH2 |
| I-400 | Ac-PL3-Asp-Npg-B5-Asp-3COOHF-Aib-Ala-Phe-Lys*3-PyrS2-3Thi-BztA-GlnR*3-Aib-Ser- |
| | NH2 |
| I-401 | Ac-PL3-Asp-Npg-B5-Asp-3COOHF-Aib-Ala-Phe-Lys*3-PyrS2-3Thi-BztA-GlnR*3-Thr-Ser- |
| | NH2 |
| I-402 | Ac-PL3-Asp-Npg-B5-Asp-3COOHF-Aib-Ala-Phe-Lys*3-PyrS2-3Thi-BztA-GlnR*3-Val-Ala- |
| | NH2 |
| I-403 | Ac-PL3-Asp-Npg-B5-Asp-3COOHF-Aib-Ala-Phe-Lys*3-PyrS2-3Thi-BztA-GlnR*3-Val-Ala- |
| | NH2 |
| I-404 | Ac-PL3-Asp-Npg-B5-Asp-3COOHF-Aib-Ala-Phe-Lys*3-PyrS2-3Thi-BztA-GlnR*3-Aib-Ala- |
| | NH2 |
| I-405 | Ac-PL3-Asp-Npg-B5-Asp-3COOHF-Aib-Ala-Phe-Lys*3-PyrS2-3Thi-BztA-GlnR*3-Aib-Ala- |
| | NH2 |
| I-406 | Ac-PL3-Asp-Npg-B5-Asp-3COOHF-Aib-Ala-Phe-Lys*3-PyrS2-3Thi-BztA-GlnR*3-Thr-Ala- |
| | NH2 |
| I-407 | Ac-PL3-Asp-Npg-B5-Asp-3COOHF-Aib-Ala-Phe-Lys*3-PyrS2-3Thi-BztA-GlnR*3-Val-Aib- |
| | NH2 |
| I-408 | Ac-PL3-Asp-Npg-B5-Asp-3COOHF-Aib-Ala-Phe-Lys*3-PyrS2-3Thi-BztA-GlnR*3-Val-Aib- |
| | NH2 |
| I-409 | Ac-PL3-Asp-Npg-B5-Asp-3COOHF-Aib-Ala-Phe-Lys*3-PyrS2-3Thi-BztA-GlnR*3-Aib-Aib- |
| | NH2 |
| I-410 | Ac-PL3-Asp-Npg-B5-Asp-3COOHF-Aib-Ala-Phe-Lys*3-PyrS2-3Thi-BztA-GlnR*3-Aib-Aib- |
| | NH2 |
| I-411 | Ac-PL3-Asp-Npg-B5-Asp-3COOHF-Aib-Ala-Phe-Lys*3-PyrS2-3Thi-BztA-GlnR*3-Thr-Aib- |
| | NH2 |
| I-412 | Ac-PL3-Asp-Npg-B5-Asp-3COOHF-Aib-Ala-Phe-Lys*3-PyrS2-3Thi-BztA-GlnR*3-Thr-Aib- |
| | NH2 |
| I-413 | Ac-PL3-Asp-Npg-B5-Asp-3COOHF-Aib-Ala-Phe-TriAzLys*3-PyrS2-3Thi-BztA-sAla*3-Val- |
| | NH2 |
| I-414 | Ac-PL3-Asp-Npg-B5-Asp-3COOHF-Aib-Ala-Phe-TriAzLys*3-PyrS2-3Thi-BztA-sAla*3-Leu- |
| | NH2 |
| I-415 | Ac-PL3-Asp-Npg-B5-Asp-3COOHF-Aib-Ala-Phe-TriAzLys*3-PyrS2-3Thi-BztA-sAla*3-Thr- |
| | NH2 |
| I-416 | Ac-PL3-Asp-Npg-B5-Asp-3COOHF-Aib-Ala-Phe-TriAzLys*3-PyrS2-3Thi-BztA-sAla*3-Ala- |
| | Ser-NH2 |
| I-417 | Ac-PL3-Asp-Npg-B5-Asp-3COOHF-Aib-Ala-Phe-TriAzLys*3-PyrS2-3Thi-BztA-sAla*3-Val- |
| | Ser-NH2 |
| I-418 | Ac-PL3-Asp-Npg-B5-Asp-3COOHF-Aib-Ala-Phe-TriAzLys*3-PyrS2-Phe-BztA-sAla*3-Ala- |
| | NH2 |
| I-419 | Ac-PL3-Asp-Npg-B5-Asp-3COOHF-Aib-Ala-Phe-TriAzLys*3-PyrS2-Phe-BztA-sAbu*3-Ala- |
| | NH2 |
| I-420 | Ac-PL3-Asp-Npg-B5-Asp-3COOHF-Aib-Ala-Phe-TriAzLys*3-PyrS2-Phe-BztA-sAbu*3-Ala- |
| | NH2 |
| I-421 | Ac-PL3-Asp-Npg-B5-Asp-3COOHF-Aib-Ala-Phe-TriAzOrn*3-PyrS2-3Thi-BztA-sAla*3-Ala- |
| | NH2 |
| I-422 | Ac-PL3-Asp-Npg-B5-Asp-3COOHF-Aib-Ala-Phe-TriAzOrn*3-PyrS2-Phe-BztA-sAla*3-Ala- |
| | NH2 |
| I-423 | Ac-PL3-Asp-Npg-B5-Asp-3COOHF-Aib-Ala-Phe-TriAzOrn*3-PyrS2-3Thi-BztA-sAbu*3-Ala- |
| | NH2 |
| I-424 | Ac-PL3-Asp-Npg-B5-Asp-3COOHF-Aib-Ala-Phe-TriAzOrn*3-PyrS2-Phe-BztA-sAbu*3-Ala- |
| | NH2 |
| I-425 | 4penteny1-MePro-Asp-AllylGly-R5-Asp-3COOHF-Aib-Ala-Phe-Lys*3-PyrS2-3Thi-BztA- |
| | GlnR*3-Ala-NH2 |
| I-426 | 5hexenyl-MePro-Asp-AllylGly-R5-Asp-3COOHF-Aib-Ala-Phe-Lys*3-PyrS2-3Thi-BztA- |
| | GlnR*3-Ala-NH2 |
| I-427 | 4penteny1-MePro-Asp-AllylGly-R5-Asp-3COOHF-Aib-Ala-Phe-Lys*3-PyrS2-3Thi-BztA- |
| | GlnR*3-Ala-NH2 |
| I-428 | 4pentenyl-MePro-Asp-AllylGly-R5-Asp-3COOHF-Aib-Ala-Phe-Lys*3-PyrS2-3Thi-BztA- |
| | GlnR*3-Ala-NH2 |
| I-429 | 5hexenyl-MePro-Asp-AllylGly-R5-Asp-3COOHF-Aib-Ala-Phe-Lys*3-PyrS2-3Thi-BztA- |
| | GlnR*3-Ala-NH2 |
| I-430 | 5hexenyl-MePro-Asp-AllylGly-R5-Asp-3COOHF-Aib-Ala-Phe-Lys*3-PyrS2-3Thi-BztA- |
| | GlnR*3-Ala-NH2 |
| I-431 | 5hexenyl-MePro-Asp-AllylGly-R5-Asp-3COOHF-Aib-Ala-Phe-Lys*3-PyrS2-3Thi-BztA- |
| | GlnR*3-Ala-NH2 |
| I-432 | Ac-PL3-Asp-Npg-B5-Asp-3COOHF-aMeL-Ala-Phe-Lys*3-PyrS2-3Thi-BztA-GlnR*3-Ala-NH2 |
| I-433 | Ac-PL3-Asp-Npg-B5-Asp-3COOHF-DaMeL-Ala-Phe-Lys*3-PyrS2-3Thi-BztA-GlnR*3-Ala- |
| | NH2 |
| I-434 | Ac-PL3-Asp-Npg-B5-Asp-3COOHF-aMeV-Ala-Phe-Lys*3-PyrS2-3Thi-BztA-GlnR*3-Ala-NH2 |
| I-435 | Ac-PL3-Asp-Npg-B5-Asp-3COOHF-aMeS-Ala-Phe-Lys*3-PyrS2-3Thi-BztA-GlnR*3-Ala-NH2 |
| I-436 | Ac-PL3-Asp-Npg-B5-Asp-3COOHF-DaMeS-Ala-Phe-Lys*3-PyrS2-3Thi-BztA-GlnR*3-Ala-NH2 |
| I-437 | Ac-PL3-Asp-Npg-B5-Asp-3COOHF-DaMeS-Ala-Phe-Lys*3-PyrS2-3Thi-BztA-GlnR*3-Ala-NH2 |
| I-438 | Ac-PL3-Asp-Npg-B5-Asp-3COOHF-aMeF-Ala-Phe-Lys*3-PyrS2-3Thi-BztA-GlnR*3-Ala-NH2 |
| I-439 | Ac-PL3-Asp-Npg-B5-Asp-3COOHF-Aib-Aib-Phe-Lys*3-PyrS2-3Thi-BztA-GlnR*3-Ala-NH2 |
| I-440 | Ac-PL3-Asp-Npg-B5-Asp-3COOHF-Aib-Cpg-Phe-Lys*3-PyrS2-3Thi-BztA-GlnR*3-Ala-NH2 |
| I-441 | Ac-PL3-Asp-Npg-B5-Asp-3COOHF-Ala-Aib-Phe-Lys*3-PyrS2-3Thi-BztA-GlnR*3-Ala-NH2 |
| I-442 | Ac-PL3-Asp-Npg-B5-Asp-3COOHF-Ala-Aib-Phe-Lys*3-PyrS2-3Thi-BztA-GlnR*3-Ala-NH2 |
| I-443 | Ac-PL3-Asp-Npg-B5-Asp-3COOHF-Ala-Cpg-Phe-Lys*3-PyrS2-3Thi-BztA-GlnR*3-Ala-NH2 |
| I-444 | Ac-PL3-Asp-Npg-B5-Asp-3COOHF-Aib-Ser-Phe-Lys*3-PyrS2-3Thi-BztA-GlnR*3-Ala-NH2 |
| I-445 | Ac-PL3-Asp-Npg-B5-Asp-3COOHF-Aib-Thr-Phe-Lys*3-PyrS2-3Thi-BztA-GlnR*3-Ala-NH2 |
| I-446 | Ac-PL3-Asp-Npg-B5-Asp-3COOHF-Aib-aThr-Phe-Lys*3-PyrS2-3Thi-BztA-GlnR*3-Ala-NH2 |
| I-447 | Ac-PL3-Asp-Npg-B5-Asp-3COOHF-Aib-Val-Phe-Lys*3-PyrS2-3Thi-BztA-GlnR*3-Ala-NH2 |
| I-448 | Ac-PL3-Asp-Npg-B5-Asp-3COOHF-Aib-Val-Phe-Lys*3-PyrS2-3Thi-BztA-GlnR*3-Ala-NH2 |
| I-449 | Ac-PL3-Asp-Npg-B5-Asp-3COOHF-Aib-Leu-Phe-Lys*3-PyrS2-3Thi-BztA-GlnR*3-Ala-NH2 |
| I-450 | Ac-PL3-Asp-Npg-B5-Asp-3COOHF-Aib-Leu-Phe-Lys*3-PyrS2-3Thi-BztA-GlnR*3-Ala-NH2 |
| I-451 | Ac-PL3-Asp-Npg-B5-Asp-3COOHF-Aib-Gln-Phe-Lys*3-PyrS2-3Thi-BztA-GlnR*3-Ala-NH2 |
| I-452 | Ac-PL3-Asp-Npg-B5-Asp-3COOHF-Aib-Gln-Phe-Lys*3-PyrS2-3Thi-BztA-GlnR*3-Ala-NH2 |
| I-453 | Ac-PL3-Asp-Npg-B5-Asp-3COOHF-Aib-MorphGln-Phe-Lys*3-PyrS2-3Thi-BztA-GlnR*3-Ala- |
| | NH2 |
| I-454 | Ac-PL3-Asp-Npg-B5-Asp-3COOHF-Aib-Lys-Phe-Lys*3-PyrS2-3Thi-BztA-GlnR*3-Ala-NH2 |
| I-455 | Ac-PL3-Asp-Npg-B5-Asp-3COOHF-Aib-Lys-Phe-Lys*3-PyrS2-3Thi-BztA-GlnR*3-Ala-NH2 |
| I-456 | Ac-PL3-Asp-Npg-B5-Asp-3COOHF-aMeDF-Ala-Phe-Lys*3-PyrS2-3Thi-BztA-GlnR*3-Ala-NH2 |
| I-457 | Ac-PL3-Asp-Npg-B5-Asp-3COOHF-aMeDF-Ala-Phe-Lys*3-PyrS2-3Thi-BztA-GlnR*3-Ala-NH2 |
| I-458 | Ac-PL3-Asp-Npg-B5-Asp-3COOHF-Aib-Ala-Phe-Lys*3-PyrS2-3Thi-BztA-GlnR*3-dAla-NH2 |
| I-459 | Ac-PL3-Asp-Npg-B5-Asp-3COOHF-Aib-Ala-Phe-Lys*3-PyrS2-3Thi-BztA-GlnR*3-dAla-NH2 |
| I-460 | Ac-PL3-Asp-Npg-B5-Asp-3COOHF-Aib-Ala-Phe-Lys*3-PyrS2-3Thi-BztA-GlnR*3-dAla-Ser- |
| | NH2 |
| I-461 | Ac-PL3-Asp-Npg-B5-Asp-3COOHF-Aib-Ala-Phe-Lys*3-PyrS2-3Thi-BztA-GlnR*3-dAla-Ser- |
| | NH2 |
| I-462 | Ac-PL3-Asp-Npg-B5-Asp-3COOHF-Aib-Ala-Phe-Lys*3-PyrS2-3Thi-BztA-GlnR*3-dLeu-NH2 |
| I-463 | Ac-PL3-Asp-Npg-B5-Asp-3COOHF-Aib-Ala-Phe-Lys*3-PyrS2-3Thi-BztA-GlnR*3-dLeu-Ser- |
| | NH2 |
| I-464 | Ac-PL3-Asp-Npg-B5-Asp-3COOHF-Aib-Ala-Phe-Lys*3-PyrS2-3Thi-BztA-GlnR*3-Ala-Ser- |
| | Leu-NH2 |
| I-465 | Ac-PL3-Asp-Npg-B5-Asp-3COOHF-Aib-Ala-Phe-Lys*3-PyrS2-3Thi-BztA-GlnR*3-Leu-Ser- |
| | Leu-NH2 |
| I-466 | Ac-PL3-Asp-Npg-B5-Asp-3COOHF-Aib-Ala-Phe-Lys*3-PyrS2-3Thi-BztA-GlnR*3-Leu-Ser- |
| | Leu-NH2 |
| I-467 | Ac-PL3-Asp-Npg-B5-Asp-3COOHF-Aib-Ala-Phe-Lys*3-PyrS2-3Thi-BztA-GlnR*3-dLeu-Ser- |
| | Leu-NH2 |
| I-468 | Ac-PL3-Asp-Npg-B5-Asp-3COOHF-Aib-Ala-Phe-Lys*3-PyrS2-3Thi-BztA-GlnR*3-dLeu-Ser- |
| | Leu-NH2 |
| I-469 | Ac-PL3-OAsp-Npg-B5-Asp-3COOHF-Aib-Ala-Phe-Lys*3-PyrS2-2F3MeF-BztA-GlnR*3-Ala- |
| | NH2 |
| I-470 | Ac-PL3-Glu-Npg-B5-Glu-3COOHF-Aib-Ala-Phe-Lys*3-PyrS2-3Thi-BztA-GlnR*3-Ala-NH2 |
| I-471 | BzAm20Allyl-MePro-Asp-AllylGly-R5-Asp-3COOHF-Aib-Ala-Phe-Lys*3-PyrS2-3Thi-BztA- |
| | GlnR*3-Ala-NH2 |
| I-472 | Ac-PL3-Asp-Npg-B5-Asp-3COOHF-Aib-Ala-Phe-Lys*3-PyrS2-2ClF-34ClF-GlnR*3-Ala-NH2 |
| I-473 | Ac-PL3-Asp-Npg-B5-Asp-3COOHF-Aib-Ala-Phe-Lys*3-PyrS2-nLeu-34ClF-GlnR*3-Ala-NH2 |
| I-474 | Ac-PL3-Asp-Npg-B5-Asp-3COOHF-Aib-Ala-Phe-Lys*3-PyrS2-nLeu-34ClF-GlnR*3-Ala-NH2 |
| I-475 | Ac-PL3-Asp-Npg-B5-Asp-3COOHF-Aib-Ala-Phe-Lys*3-PyrS2-CypA-34ClF-GlnR*3-Ala-NH2 |
| I-476 | Ac-PL3-Asp-Npg-B5-Asp-3COOHF-Aib-Ala-Phe-Lys*3-PyrS2-CypA-34ClF-GlnR*3-Ala-NH2 |
| I-477 | Ac-PL3-Asp-Npg-B5-Asp-3COOHF-Aib-Ala-Tyr-Lys*3-PyrS2-Phe-34ClF-GlnR*3-Ala-NH2 |
| I-478 | Ac-PL3-Asp-Npg-B5-Asp-3COOHF-Aib-Ala-3Thi-Lys*3-PyrS2-Phe-34ClF-GlnR*3-Ala-NH2 |
| I-479 | Ac-PL3-Asp-Npg-B5-Asp-3COOHF-Aib-Ala-nLeu-Lys*3-PyrS2-Phe-34ClF-GlnR*3-Ala-NH2 |
| I-480 | Ac-PL3-Asp-Npg-B5-Asp-3COOHF-Aib-Ala-nLeu-Lys*3-PyrS2-Phe-34ClF-GlnR*3-Ala-NH2 |
| I-481 | Ac-PL3-Asp-Npg-B5-Asp-3COOHF-Aib-Ala-2NapA-Lys*3-PyrS2-Phe-34ClF-GlnR*3-Ala-NH2 |
| I-482 | Ac-PL3-Asp-Npg-B5-Asp-3COOHF-Aib-Ala-2NapA-Lys*3-PyrS2-Phe-34ClF-GlnR*3-Ala-NH2 |
| I-483 | Ac-PL3-Asp-Npg-B5-Asp-3COOHF-Aib-Ala-Phe-Lys*3-PyrS2-Phe-2NapA-GlnR*3-Ala-NH2 |
| I-484 | Ac-PL3-Asp-Npg-B5-Asp-3COOHF-Aib-Ala-Phe-Lys*3-PyrS2-Phe-2NapA-GlnR*3-Ala-NH2 |
| I-485 | Ac-PL3-Asp-Npg-B5-Asp-3COOHF-Aib-Ala-Phe-Lys*3-PyrS2-3Thi-2NapA-GlnR*3-Ala-NH2 |
| I-486 | Ac-PL3-Asp-Npg-B5-Asp-3COOHF-Aib-Ala-Phe-Lys*3-PyrS2-3Thi-2NapA-GlnR*3-Ala-NH2 |
| I-487 | Ac-PL3-Asp-Npg-B5-Asp-3COOHF-Aib-Ala-Phe-Lys*3-PyrS2-2ClF-2NapA-GlnR*3-Ala-NH2 |
| I-488 | Ac-PL3-Asp-Npg-B5-Asp-3COOHF-Aib-Ala-Phe-Lys*3-PyrS2-2ClF-2NapA-GlnR*3-Ala-NH2 |
| I-489 | Ac-PL3-Asp-Npg-B5-Asp-3COOHF-Aib-Ala-Phe-Lys*3-PyrS2-nLeu-2NapA-GlnR*3-Ala-NH2 |
| I-490 | Ac-PL3-Asp-Npg-B5-Asp-3COOHF-Aib-Ala-Phe-Lys*3-PyrS2-nLeu-2NapA-GlnR*3-Ala-NH2 |
| I-491 | Ac-PL3-Asp-Npg-B5-Asp-3COOHF-Aib-Ala-Phe-Lys*3-PyrS2-CypA-2NapA-GlnR*3-Ala-NH2 |
| I-492 | Ac-PL3-Asp-Npg-B5-Asp-3COOHF-Aib-Ala-Phe-Lys*3-PyrS2-CypA-2NapA-GlnR*3-Ala-NH2 |
| I-493 | Ac-PL3-Asp-Npg-B5-Asp-3COOHF-Aib-Ala-Phe-Lys*3-PyrS2-3Thi-BztA-GlnR*3-Leu-Asp- |
| | Ala-NH2 |
| I-494 | Ac-PL3-Asp-Npg-B5-Asp-3COOHF-Aib-Ala-Phe-Lys*3-PyrS2-3Thi-BztA-GlnR*3-Leu-Glu- |
| | Ala-NH2 |
| I-495 | Ac-PL3-Asp-Npg-B5-Asp-3COOHF-Aib-Ala-Phe-Lys*3-PyrS2-3Thi-BztA-GlnR*3-Leu-Glu- |
| | Ala-NH2 |
| I-496 | Ac-PL3-Asp-Npg-B5-Asp-3COOHF-Aib-Ala-Phe-Lys*3-PyrS2-3Thi-BztA-GlnR*3-Leu-Ser- |
| | Ala-NH2 |
| I-497 | Ac-PL3-Asp-Npg-B5-Asp-3COOHF-Aib-Ala-Phe-Lys*3-PyrS2-3Thi-BztA-GlnR*3-Leu-Ser- |
| | Ala-NH2 |
| I-498 | Ac-PL3-Asp-Npg-B5-Asp-3COOHF-Aib-Ala-Phe-Lys*3-PyrS2-3Thi-BztA-GlnR*3-Leu-Thr- |
| | Ala-NH2 |
| I-499 | Ac-PL3-Asp-Npg-B5-Asp-3COOHF-Aib-Ala-Phe-Lys*3-PyrS2-3Thi-BztA-GlnR*3-Leu-Thr- |
| | Ala-NH2 |
| I-500 | Ac-PL3-Asp-Npg-B5-Asp-3COOHF-Aib-Ala-Phe-Lys*3-PyrS2-3Thi-BztA-GlnR*3-Leu-aThr- |
| | Ala-NH2 |
| I-501 | Ac-PL3-Asp-Npg-B5-Asp-3COOHF-Aib-Ala-Phe-Lys*3-PyrS2-3Thi-BztA-GlnR*3-Leu-aThr- |
| | Ala-NH2 |
| I-502 | Ac-PL3-Asp-Npg-B5-Asp-3COOHF-Aib-Ala-Phe-Lys*3-PyrS2-3Thi-BztA-GlnR*3-Leu-Asp- |
| | Leu-NH2 |
| I-503 | Ac-PL3-Asp-Npg-B5-Asp-3COOHF-Aib-Ala-Phe-Lys*3-PyrS2-3Thi-BztA-GlnR*3-Leu-Asp- |
| | Leu-NH2 |
| I-504 | Ac-PL3-Asp-Npg-B5-Asp-3COOHF-Aib-Ala-Phe-Lys*3-PyrS2-3Thi-BztA-GlnR*3-Leu-Glu- |
| | Leu-NH2 |
| I-505 | Ac-PL3-Asp-Npg-B5-Asp-3COOHF-Aib-Ala-Phe-Lys*3-PyrS2-3Thi-BztA-GlnR*3-Leu-Glu- |
| | Leu-NH2 |
| I-506 | Ac-PL3-Asp-Npg-B5-Asp-3COOHF-Aib-Ala-Phe-Lys*3-PyrS2-3Thi-BztA-GlnR*3-Val-Asp- |
| | Ala-NH2 |
| I-507 | Ac-PL3-Asp-Npg-B5-Asp-3COOHF-Aib-Ala-Phe-Lys*3-PyrS2-3Thi-BztA-GlnR*3-Val-Glu- |
| | Ala-NH2 |
| I-508 | Ac-PL3-Asp-Npg-B5-Asp-3COOHF-Aib-Ala-Phe-Lys*3-PyrS2-3Thi-BztA-GlnR*3-Val-Thr- |
| | Ala-NH2 |
| I-509 | Ac-PL3-Asp-Npg-B5-Asp-3COOHF-Aib-Ala-Phe-Lys*3-PyrS2-3Thi-BztA-GlnR*3-Val-Thr- |
| | Ala-NH2 |
| I-510 | Ac-PL3-Asp-Npg-B5-Asp-3COOHF-Aib-Ala-Phe-Lys*3-PyrS2-3Thi-BztA-GlnR*3-Val-aThr- |
| | Ala-NH2 |
| I-511 | Ac-PL3-Asp-Npg-B5-Asp-3COOHF-Aib-Ala-Phe-Lys*3-PyrS2-3Thi-BztA-GlnR*3-Val-aThr- |
| | Ala-NH2 |
| I-512 | Ac-PL3-Asp-Npg-B5-Asp-3COOHF-Aib-Ala-Phe-Lys*3-PyrS2-3Thi-BztA-GlnR*3-Val-Asp- |
| | Leu-NH2 |
| I-513 | Ac-PL3-Asp-Npg-B5-Asp-3COOHF-Aib-Ala-Phe-Lys*3-PyrS2-3Thi-BztA-GlnR*3-Val-Asp- |
| | Leu-NH2 |
| I-514 | Ac-Gly-PL3-Asp-Npg-B5-Asp-3COOHF-Aib-Ala-Phe-Lys*3-PyrS2-3Thi-BztA-GlnR*3-Ala |
| I-515 | Ac-Sar-PL3-Asp-Npg-B5-Asp-3COOHF-Aib-Ala-Phe-Lys*3-PyrS2-3Thi-BztA-GlnR*3-Ala- |
| | NH2 |
| I-516 | Ac-NMebAla-PL3-Asp-Npg-B5-Asp-3COOHF-Aib-Ala-Phe-Lys*3-PyrS2-3Thi-BztA-GlnR*3- |
| | Ala-NH2 |
| I-517 | Ac-PL3-Asp-Npg-B5-Asp-3COOHF-Aib-Ala-Phe-Lys*3-PyrS2-3Thi-BztA-GlnR*3- |
| | [BiotinPEG8]Lys-NH2 |
| I-518 | Ac-PL3-Glu-Npg-B5-Glu-3COOHF-Aib-Ala-Phe-Lys*3-PyrS2-3Thi-BztA-GlnR*3- |
| | [BiotinPEG8]Lys-NH2 |
| I-519 | 5hexenyl-MePro-Asp-[Bn][Allyl]Dap-R5-Asp-3COOHF-Aib-Ala-Phe-Lys*3-PyrS2-3Thi-BztA- |
| | GlnR*3-Ala-NH2 |
| I-520 | 5hexenyl-MePro-Asp-[Phc][Allyl]Dap-R5-Asp-3COOHF-Aib-Ala-Phe-Lys*3-PyrS2-3Thi-BztA- |
| | GlnR*3-Ala-NH2 |
| I-521 | Ac-PL3-Asp-Npg-B5-Asp-3COOHF-Aib-Asp-Phe-Lys*3-PyrS2-3Thi-BztA-GlnR*3-Ala-NH2 |
| I-522 | Ac-PL3-Asp-Npg-B5-aThr-3COOHF-Aib-Asp-Phe-Lys*3-PyrS2-3Thi-BztA-GlnR*3-Ala-NH2 |
| I-523 | Ac-PL3-Asp-Npg-B5-Asp-3COOHF-Aib-Glu-Phe-Lys*3-PyrS2-3Thi-BztA-GlnR*3-Ala-NH2 |
| I-524 | Ac-PL3-Asp-Npg-B5-aThr-3COOHF-Aib-Glu-Phe-Lys*3-PyrS2-3Thi-BztA-GlnR*3-Ala-NH2 |
| I-525 | Ac-PL3-Asp-Npg-B5-Asp-3COOHF-Aib-Aad-Phe-Lys*3-PyrS2-3Thi-BztA-GlnR*3-Ala-NH2 |
| I-526 | Ac-PL3-Asp-Npg-B5-aThr-3COOHF-Aib-Aad-Phe-Lys*3-PyrS2-3Thi-BztA-GlnR*3-Ala-NH2 |
| I-527 | Ac-PL3-Asp-Npg-B5-Asp-3COOHF-Aib-nLeu-Phe-Lys*3-PyrS2-3Thi-BztA-GlnR*3-Ala-NH2 |
| I-528 | Ac-PL3-Asp-Npg-B5-Asp-3COOHF-Aib-nLeu-Phe-Lys*3-PyrS2-3Thi-BztA-GlnR*3-Ala-NH2 |
| I-529 | Ac-PL3-Asp-Npg-B5-Asp-3COOHF-Aib-Phe-Phe-Lys*3-PyrS2-3Thi-BztA-GlnR*3-Ala-NH2 |
| I-530 | Ac-PL3-Asp-Npg-B5-Asp-3COOHF-Aib-hPhe-Phe-Lys*3-PyrS2-3Thi-BztA-GlnR*3-Ala-NH2 |
| I-531 | Ac-PL3-Asp-Npg-B5-Asp-3COOHF-Aib-Cba-Phe-Lys*3-PyrS2-3Thi-BztA-GlnR*3-Ala-NH2 |
| I-532 | Ac-PL3-Asp-Npg-B5-Asp-3COOHF-Aib-Cba-Phe-Lys*3-PyrS2-3Thi-BztA-GlnR*3-Ala-NH2 |
| I-533 | Ac-PL3-Asp-Npg-B5-Asp-3COOHF-Aib-hTyr-Phe-Lys*3-PyrS2-3Thi-BztA-GlnR*3-Ala-NH2 |
| I-534 | Ac-PL3-Asp-Npg-B5-Asp-3COOHF-Aib-AcLys-Phe-Lys*3-PyrS2-3Thi-BztA-GlnR*3-Ala-NH2 |
| I-535 | Ac-PL3-Asp-Npg-B5-Asp-3COOHF-Aib-Ala-Phe-Lys*3-PyrS2-Val-BztA-GlnR*3-Ala-NH2 |
| I-536 | Ac-PL3-Asp-Npg-B5-Asp-3COOHF-Aib-Ala-Phe-Lys*3-PyrS2-Ile-BztA-GlnR*3-Ala-NH2 |
| I-537 | Ac-PL3-Asp-Npg-B5-Asp-3COOHF-Aib-Ala-Phe-Lys*3-PyrS2-Chg-BztA-GlnR*3-Ala-NH2 |
| I-538 | Ac-PL3-Asp-Npg-B5-Asp-3COOHF-Aib-Ala-Phe-Lys*3-PyrS2-DiethA-BztA-GlnR*3-Ala-NH2 |
| I-539 | Ac-PL3-Asp-Npg-B5-Asp-3COOHF-Aib-Ala-Phe-Lys*3-PyrS2-hnLeu-BztA-GlnR*3-Ala-NH2 |
| I-540 | Ac-PL3-Asp-Npg-B5-Asp-3COOHF-Aib-Ala-Phe-Lys*3-PyrS2-OctG-BztA-GlnR*3-Ala-NH2 |
| I-541 | Ac-PL3-Asp-Npg-B5-Asp-3COOHF-Aib-Ala-Phe-Lys*3-PyrS2-2Thi-BztA-GlnR*3-Ala-NH2 |
| I-542 | Ac-PL3-Asp-Npg-B5-Asp-3COOHF-Aib-Ala-Phe-Lys*3-PyrS2-2cbmF-BztA-GlnR*3-Ala-NH2 |
| I-543 | Ac-PL3-Glu-Npg-B5-Asp-3COOHF-Aib-Ala-Phe-Lys*3-PyrS2-3Thi-BztA-GlnR*3-Ala-NH2 |
| I-544 | Ac-PL3-Glu-Npg-B5-Asp-3COOHF-Aib-Ala-Phe-Lys*3-PyrS2-3Thi-BztA-GlnR*3-Ala-NH2 |
| I-545 | Ac-PL3-Aad-Npg-B5-Asp-3COOHF-Aib-Ala-Phe-Lys*3-PyrS2-3Thi-BztA-GlnR*3-Ala-NH2 |
| I-546 | Ac-PL3-Aad-Npg-B5-Asp-3COOHF-Aib-Ala-Phe-Lys*3-PyrS2-3Thi-BztA-GlnR*3-Ala-NH2 |
| I-547 | Ac-PL3-Asp-Npg-B5-Glu-3COOHF-Aib-Ala-Phe-Lys*3-PyrS2-3Thi-BztA-GlnR*3-Ala-NH2 |
| I-548 | Ac-PL3-Asp-Npg-B5-Aad-3COOHF-Aib-Ala-Phe-Lys*3-PyrS2-3Thi-BztA-GlnR*3-Ala-NH2 |
| I-549 | Ac-PL3-Aad-Npg-B5-Glu-3COOHF-Aib-Ala-Phe-Lys*3-PyrS2-3Thi-BztA-GlnR*3-Ala-NH2 |
| I-550 | Ac-PL3-Glu-Npg-B5-Aad-3COOHF-Aib-Ala-Phe-Lys*3-PyrS2-3Thi-BztA-GlnR*3-Ala-NH2 |
| I-551 | Ac-PL3-Aad-Npg-B5-Aad-3COOHF-Aib-Ala-Phe-Lys*3-PyrS2-3Thi-BztA-GlnR*3-Ala-NH2 |
| I-552 | Ac-PL3-Glu-Npg-B5-Glu-Glu-Aib-Ala-Phe-Lys*3-PyrS2-3Thi-BztA-GlnR*3-Ala-NH2 |
| I-553 | Ac-PL3-Aad-Npg-B5-Glu-Glu-Aib-Ala-Phe-Lys*3-PyrS2-3Thi-BztA-GlnR*3-Ala-NH2 |
| I-554 | Ac-PL3-Glu-Npg-B5-Glu-Asp-Aib-Ala-Phe-Lys*3-PyrS2-3Thi-BztA-GlnR*3-Ala-NH2 |
| I-555 | Ac-PL3-Aad-Npg-B5-Glu-Asp-Aib-Ala-Phe-Lys*3-PyrS2-3Thi-BztA-GlnR*3-Ala-NH2 |
| I-556 | Ac-PL3-Aad-Npg-B5-Aad-Glu-Aib-Ala-Phe-Lys*3-PyrS2-3Thi-BztA-GlnR*3-Ala-NH2 |
| I-557 | Ac-PL3-Asp-Npg-B5-Asp-3COOHF-Aib-Ala-Phe-dLys*3-PyrS2-3Thi-BztA-dGlnR*3-Ala-NH2 |
| I-558 | Ac-PL3-Asp-Npg-B5-Asp-3COOHF-Aib-Ala-Phe-dOrn*3-PyrS2-3Thi-BztA-GlnR*3-Ala-NH2 |
| I-559 | Ac-PL3-Asp-Npg-B5-Asp-3COOHF-Aib-Ala-Phe-dDab*3-PyrS2-3Thi-BztA-GlnR*3-Ala-NH2 |
| I-560 | Ac-PL3-Asp-Npg-B5-Asp-3COOHF-Aib-Ala-Phe-Orn*3-PyrS2-3Thi-BztA-hGlnR*3-Ala-NH2 |
| I-561 | Ac-PL3-Asp-Npg-B5-Asp-3COOHF-Aib-Ala-Phe-NMeOrn*3-PyrS2-3Thi-BztA-hGlnR*3-Ala- |
| | NH2 |
| I-562 | 4pentenyl-MePro-Asp-[Bn][Allyl]Dap-R5-Asp-3COOHF-Aib-Ala-Phe-Lys*3-PyrS2-3Thi-BztA- |
| | GlnR*3-Ala-NH2 |
| I-563 | 4pentenyl-MePro-Asp-[Phc][Allyl]Dap-R5-Asp-3COOHF-Aib-Ala-Phe-Lys*3-PyrS2-3Thi-BztA- |
| | GlnR*3-Ala-NH2 |
| I-564 | 5hexenyl-MePro-Asp-[Piv][Allyl]Dap-R5-Asp-3COOHF-Aib-Ala-Phe-Lys*3-PyrS2-3Thi-BztA- |
| | GlnR*3-Ala-NH2 |
| I-565 | 5hexenyl-MePro-Asp-[CyCO][Allyl]Dap-R5-Asp-3COOHF-Aib-Ala-Phe-Lys*3-PyrS2-3Thi- |
| | BztA-GlnR*3-Ala-NH2 |
| I-566 | Ac-PL3-Asp-Npg-B5-Asp-3COOHF-Aib-Ala-Phe-[2_6-naph]Cys-PyrS2-3Thi-BztA-Cys-Ala- |
| | NH2 |
| I-567 | Ac-PL3-Asp-Npg-B5-Asp-3COOHF-Aib-Ala-Phe-[3_3-biph]Cys-PyrS2-3Thi-BztA-Cys-Ala- |
| | NH2 |
| I-568 | Ac-PL3-Asp-Npg-B5-Asp-3COOHF-Aib-Ala-4FF-Lys*3-PyrS2-3Thi-BztA-GlnR*3-Ala-NH2 |
| I-569 | Ac-PL3-Asp-Npg-B5-Asp-3COOHF-Aib-Ala-4FF-Lys*3-PyrS2-3Thi-BztA-GlnR*3-Ala-NH2 |
| I-570 | Ac-PL3-Asp-Npg-B5-Asp-3COOHF-Aib-Ala-4ClF-Lys*3-PyrS2-3Thi-BztA-GlnR*3-Ala-NH2 |
| I-571 | Ac-PL3-Asp-Npg-B5-Asp-3COOHF-Aib-Ala-4ClF-Lys*3-PyrS2-3Thi-BztA-GlnR*3-Ala-NH2 |
| I-572 | Ac-PL3-Asp-Npg-B5-Asp-3COOHF-Aib-Ala-4BrF-Lys*3-PyrS2-3Thi-BztA-GlnR*3-Ala-NH2 |
| I-573 | Ac-PL3-Asp-Npg-B5-Asp-3COOHF-Aib-Ala-4BrF-Lys*3-PyrS2-3Thi-BztA-GlnR*3-Ala-NH2 |
| I-574 | Ac-PL3-Asp-Npg-B5-Asp-3COOHF-Aib-Ala-3FF-Lys*3-PyrS2-3Thi-BztA-GlnR*3-Ala-NH2 |
| I-575 | Ac-PL3-Asp-Npg-B5-Asp-3COOHF-Aib-Ala-3FF-Lys*3-PyrS2-3Thi-BztA-GlnR*3-Ala-NH2 |
| I-576 | Ac-PL3-Asp-Npg-B5-Asp-3COOHF-Aib-Ala-3ClF-Lys*3-PyrS2-3Thi-BztA-GlnR*3-Ala-NH2 |
| I-577 | Ac-PL3-Asp-Npg-B5-Asp-3COOHF-Aib-Ala-3ClF-Lys*3-PyrS2-3Thi-BztA-GlnR*3-Ala-NH2 |
| I-578 | Ac-PL3-Asp-Npg-B5-Asp-3COOHF-Aib-Ala-3BrF-Lys*3-PyrS2-3Thi-BztA-GlnR*3-Ala-NH2 |
| I-579 | Ac-PL3-Asp-Npg-B5-Asp-3COOHF-Aib-Ala-3BrF-Lys*3-PyrS2-3Thi-BztA-GlnR*3-Ala-NH2 |
| I-580 | Ac-PL3-Asp-Npg-B5-Asp-3COOHF-Aib-Ala-2FF-Lys*3-PyrS2-3Thi-BztA-GlnR*3-Ala-NH2 |
| I-581 | Ac-PL3-Asp-Npg-B5-Asp-3COOHF-Aib-Ala-2FF-Lys*3-PyrS2-3Thi-BztA-GlnR*3-Ala-NH2 |
| I-582 | Ac-PL3-Asp-Npg-B5-Asp-3COOHF-Aib-Ala-30MeF-Lys*3-PyrS2-3Thi-BztA-GlnR*3-Ala- |
| | NH2 |
| I-583 | Ac-PL3-Asp-Npg-B5-Asp-3COOHF-Aib-Ala-30MeF-Lys*3-PyrS2-3Thi-BztA-GlnR*3-Ala- |
| | NH2 |
| I-584 | Ac-PL3-Asp-Npg-B5-Asp-3COOHF-Aib-Ala-4CNF-Lys*3-PyrS2-3Thi-BztA-GlnR*3-Ala-NH2 |
| I-585 | Ac-PL3-Asp-Npg-B5-Asp-3COOHF-Aib-Ala-4CNF-Lys*3-PyrS2-3Thi-BztA-GlnR*3-Ala-NH2 |
| I-586 | Ac-PL3-Asp-Npg-B5-Asp-3COOHF-Aib-Ala-3CNF-Lys*3-PyrS2-3Thi-BztA-GlnR*3-Ala-NH2 |
| I-587 | Ac-PL3-Asp-Npg-B5-Asp-3COOHF-Aib-Ala-3CNF-Lys*3-PyrS2-3Thi-BztA-GlnR*3-Ala-NH2 |
| I-588 | Ac-PL3-Asp-Npg-B5-Asp-3COOHF-Aib-Ala-4MeF-Lys*3-PyrS2-3Thi-BztA-GlnR*3-Ala-NH2 |
| I-589 | Ac-PL3-Asp-Npg-B5-Asp-3COOHF-Aib-Ala-4MeF-Lys*3-PyrS2-3Thi-BztA-GlnR*3-Ala-NH2 |
| I-590 | Ac-PL3-Asp-Npg-B5-Asp-3COOHF-Aib-Ala-3MeF-Lys*3-PyrS2-3Thi-BztA-GlnR*3-Ala-NH2 |
| I-591 | Ac-PL3-Asp-Npg-B5-Asp-3COOHF-Aib-Ala-3MeF-Lys*3-PyrS2-3Thi-BztA-GlnR*3-Ala-NH2 |
| I-592 | Ac-PL3-Asp-Npg-B5-Asp-3COOHF-Aib-Ala-Aic-Lys*3-PyrS2-3Thi-BztA-GlnR*3-Ala-NH2 |
| I-593 | Ac-PL3-Asp-Npg-B5-Asp-3COOHF-Aib-Ala-Aic-Lys*3-PyrS2-3Thi-BztA-GlnR*3-Ala-NH2 |
| I-594 | Ac-PL3-Asp-Npg-B5-Asp-3COOHF-Aib-Ala-RbiPrF-Lys*3-PyrS2-3Thi-BztA-GlnR*3-Ala-NH2 |
| I-595 | Ac-PL3-Asp-Npg-B5-Asp-3COOHF-Aib-Ala-RbiPrF-Lys*3-PyrS2-3Thi-BztA-GlnR*3-Ala-NH2 |
| I-596 | Ac-PL3-Asp-Npg-B5-Asp-3COOHF-Aib-Ala-SbiPrF-Lys*3-PyrS2-3Thi-BztA-GlnR*3-Ala-NH2 |
| I-597 | Ac-PL3-Asp-Npg-B5-Asp-3COOHF-Aib-Ala-SbiPrF-Lys*3-PyrS2-3Thi-BztA-GlnR*3-Ala-NH2 |
| I-598 | Ac-PL3-Asp-Npg-B5-Asp-3COOHF-Aib-Ala-RbiPrDF-Lys*3-PyrS2-3Thi-BztA-GlnR*3-Ala- |
| | NH2 |
| I-599 | Ac-PL3-Asp-Npg-B5-Asp-3COOHF-Aib-Ala-RbiPrDF-Lys*3-PyrS2-3Thi-BztA-GlnR*3-Ala- |
| | NH2 |
| I-600 | Ac-PL3-Asp-Npg-B5-Asp-3COOHF-Aib-Ala-RbMeXylA-Lys*3-PyrS2-3Thi-BztA-GlnR*3-Ala- |
| | NH2 |
| I-601 | Ac-PL3-Asp-Npg-B5-Asp-3COOHF-Aib-Ala-RbMeXylA-Lys*3-PyrS2-3Thi-BztA-GlnR*3-Ala- |
| | NH2 |
| I-602 | Ac-PL3-Asp-Npg-B5-Asp-3COOHF-Aib-Ala-RbMeXylDA-Lys*3-PyrS2-3Thi-BztA-GlnR*3- |
| | Ala-NH2 |
| I-603 | Ac-PL3-Asp-Npg-B5-Asp-3COOHF-Aib-Ala-RbMeXylDA-Lys*3-PyrS2-3Thi-BztA-GlnR*3- |
| | Ala-NH2 |
| I-604 | Ac-PL3-Asp-Npg-B5-Asp-3COOHF-Aib-Ala-SbMeXylA-Lys*3-PyrS2-3Thi-BztA-GlnR*3-Ala- |
| | NH2 |
| I-605 | Ac-PL3-Asp-Npg-B5-Asp-3COOHF-Aib-Ala-SbMeXylDA-Lys*3-PyrS2-3Thi-BztA-GlnR*3- |
| | Ala-NH2 |
| I-606 | Ac-PL3-Glu-Npg-B5-Glu-3COOHF-Aib-Ala-Phe-Lys*3-PyrS2-3Thi-BztA-GlnR*3-AzLys-NH2 |
| I-607 | Ac-PL3-Asp-Npg-B5-Asp-3COOHF-Aib-Ala-Phe-Lys*3-PyrS2-3Thi-BztA-GlnR*3-AzLys-NH2 |

[1089] Certain results from various additional assessment for various additional agents and compositions are presented in Table E3 below. See Table E1 and Table E2 for description. Among other things, these data confirm that technologies of the present disclosure can provide various activities and/or benefits.

TABLE E3
Certain data of various compositions as examples.

| 1 | 2 | 3 | 4 | 5 | 6 | 7 | 8 | 9 |
|---|---|---|---|---|---|---|---|---|
| I-608 | A | | | | 1956.8426 | | | |
| I-609 | A | | | | 1956.8426 | | | |
| I-700 | A | | | | 1956.8426 | | | |
| I-701 | B | | | | 2136.9519 | | | |
| I-702 | B | | | | 2164.9832 | 2166.5 | 2164.6 | |
| I-703 | B | | | | 2150.9675 | 2152.6 | 2150.6 | |
| I-704 | A | C | | | 2178.9988 | 2180.3 | 2178.4 | |
| I-705 | A | C | | | 2221.0458 | 2222.4 | 2220.5 | |
| I-706 | A | | | | 2060.9052 | | | |
| I-707 | A | | | | 2086.9209 | | | |
| I-708 | A | B | | | 2170.9209 | | | |
| I-709 | A | A | | + | 2084.9165 | | | |
| I-710 | A | B | | | 2102.9522 | 2104.9 | 2102.9 | |
| I-711 | A | B | | | 2088.9365 | 2090.8 | 2089.1 | |
| I-712 | A | A | | | 2003.8838 | 2005.7 | 2003.8 | |
| I-713 | A | | | | 2003.8838 | 2005.7 | 2003.9 | |
| I-714 | A | A | | | 2060.9052 | 2062.8 | 2061 | |
| I-715 | A | A | | | 2116.9678 | 2118.8 | 2116.9 | |
| I-716 | A | B | | | 2116.9678 | 2118.9 | 2116.9 | |
| I-717 | A | B | | | 2130.9835 | 2132.9 | 2131.2 | |
| I-718 | A | C | | | 2130.9835 | 2132.8 | 2131 | |
| I-719 | A | A | ++ | + | 2100.9365 | 2102.8 | 2100.4 | |
| I-720 | A | C | ++ | + | 2100.9365 | 2102.8 | 2100.7 | |
| I-721 | A | B | ++ | + | 2090.9158 | 2092.8 | 2090.9 | |
| I-722 | A | B | + | | 2150.9522 | 2152.9 | 2151 | |
| I-723 | A | B | | | 2117.9267 | 2119.7 | 2117.8 | |
| I-724 | A | B | | | 2131.9424 | 2133.8 | 2132.2 | |
| I-725 | A | C | | | 2189.9631 | 2191.9 | 2189.7 | |
| I-726 | B | C | | | 2189.9631 | 2191.9 | 2190.2 | |
| I-727 | A | B | | | 2166.9471 | 2168.9 | 2166.3 | |
| I-728 | A | B | | | 2166.9471 | 2169 | 2166.7 | |
| I-729 | A | A | | | 2122.9209 | 2124.7 | 2122.7 | |
| I-730 | A | | | | 2086.9209 | 2088.7 | 2086.7 | |
| I-731 | A | | | | 2128.9678 | 2130.8 | 2128.9 | |
| I-732 | A | A | | | 2134.9209 | 2136.7 | 2134.4 | |
| I-733 | A | A | | | 2098.9209 | 2100.8 | 2098.9 | |
| I-734 | A | B | | | 2140.9678 | 2142.8 | 2140.6 | |
| I-735 | A | C | | | 2148.9365 | 2150.8 | 2149.1 | |
| I-736 | A | A | | | 2112.9365 | 2114.8 | 2113 | |
| I-737 | A | A | | | 2154.9835 | 2156.8 | 2154.6 | |
| I-738 | A | C | | | 2232.9365 | | | |
| I-739 | A | B | | | 2232.9365 | 2234.8 | 2232.8 | |
| I-740 | A | A | | | 2196.9365 | 2199 | 2197 | |
| I-741 | E | D | | +++ | 2074.9209 | 2076.8 | 2075 | |
| I-742 | E | D | | +++ | 2074.9209 | 2076.8 | 2075 | |
| I-743 | C | D | | | 2101.8954 | 2103 | 2100.8 | |
| I-744 | A | D | | | 2115.9111 | 2117.9 | 2115.7 | |
| I-745 | A | C | | | 2115.9111 | 2117.9 | 2115.9 | |
| I-746 | A | C | | | 2130.9835 | 2132.8 | 2130.9 | |
| I-747 | A | B | | + | 2102.9522 | 2104.8 | 2103 | |
| I-748 | A | C | | + | 2138.927 | 2140.8 | 2138.6 | |
| I-749 | A | C | | | 2164.9678 | 2166.9 | 2164.9 | |
| I-750 | A | B | | | 2118.9471 | 2120.8 | 2118.3 | |
| I-751 | C | D | | | 2391.1975 | 2393.7 | 2391.6 | |
| I-752 | B | D | | | 2154.9271 | 1079.2 | 2155.4 | |
| I-753 | A | C | | + | 2136.9365 | 2138.9 | 2137 | |
| I-754 | A | C | | | 2110.8879 | 2112.9 | 2111.3 | |
| I-755 | A | C | | | 2186.9192 | 1046.2 | 1044.3 | |
| I-756 | A | D | | | 2186.9192 | 2188.9 | 2186.5 | |
| I-757 | A | | | | 2157.8749 | 2159.8 | 2157.7 | |
| I-758 | B | | | | 2157.8749 | 2159.9 | 2158.6 | |
| I-759 | B | | | | 2171.8905 | 2173.9 | 2171.4 | |
| I-760 | B | | | | 2171.8905 | 2173.9 | 2171.3 | |
| I-761 | A | | | | 2060.9458 | 2063.9 | 2062.4 | |
| I-762 | A | C | | | 2060.9458 | 2063.8 | 2061.8 | |
| I-763 | A | | | | 2021.055 | 2023.1 | 2021.4 | |
| I-764 | A | C | | | 2021.055 | 2023.1 | 2021.4 | |
| I-765 | B | | | | 2070.9342 | 2075 | 2072.9 | |
| I-766 | B | | | | 2070.9342 | 2073.9 | 2072.8 | |
| I-767 | A | | | | 2043.0394 | 2045.1 | 2043.5 | |
| I-768 | A | | | | 2043.0394 | 2045.2 | 2043.3 | |
| I-769 | A | | | | 2057.055 | 2059.2 | 2057.6 | |
| I-770 | A | C | | | 2057.055 | 2059.2 | 2057.1 | |
| I-771 | A | | | | 2063.0114 | 2065.1 | 2063.4 | |
| I-772 | A | C | | + | 2063.0114 | 2065.1 | 2063.3 | |
| I-773 | B | | | | 2063.0114 | 2065.2 | 2063.4 | |
| I-774 | C | D | | | 2063.0114 | 2065.1 | 2063.1 | |
| I-775 | A | C | | | 2033.055 | 2035.1 | 2033.5 | |
| I-776 | A | C | | | 2033.055 | 2035.2 | 2033.2 | |
| I-777 | B | | | | 2136.9519 | 2138.8 | 2136.9 | |
| I-778 | A | | | | 2150.9675 | 2152.8 | 2150.6 | |
| I-779 | B | | | | 2150.9675 | 2152.8 | 2151.1 | |
| I-780 | A | | | | 2074.9209 | 2076.8 | 2074.8 | |
| I-781 | A | D | | | 2088.9365 | 2090.8 | 2088.8 | |
| I-782 | A | B | | | 2216.9951 | 2219 | 2216.7 | |
| I-783 | A | C | | | 2359.0693 | 2361.1 | 2359.7 | |
| I-784 | A | | | | 2501.1436 | 1252.3 | 1250.6 | |
| I-785 | A | B | | + | 2203.9999 | 2205.9 | 2204.2 | |
| I-786 | A | C | | + | 2017.8994 | 2019.7 | 2017.6 | |
| I-787 | A | B | | | 2088.9365 | 2090.8 | 2089.2 | |
| I-788 | A | C | | +++ | 1975.8525 | 1977.7 | 1975.8 | |
| I-789 | A | C | | + | 2188.9638 | 2191 | 2188.8 | |
| I-790 | A | C | | + | 2331.038 | 2333.1 | 2331.5 | |
| I-791 | A | | | | 2175.9686 | 2178 | 2175.7 | |
| I-792 | A | D | | | 1975.8525 | 1977.7 | 1975.6 | |
| I-793 | A | D | | | 2046.8896 | 2048.9 | 2046.8 | |
| I-794 | A | | | | 2046.8896 | 2077 | 2075.8 | |
| I-795 | A | D | | +++ | 2188.9638 | 2191.1 | 2189.3 | |
| I-796 | A | | | | 2188.9638 | 2191 | 2189 | |
| I-797 | A | | | | 2175.9686 | 2178.2 | 2176 | |
| I-798 | A | | | | 2175.9686 | 2178.1 | 2176.2 | |
| I-799 | A | C | | | 2102.9522 | 2105 | 2103.4 | |
| I-800 | A | C | | | 2102.9522 | 2105 | 2103.1 | |
| I-801 | A | D | | | 2116.9678 | 2119 | 2117.1 | |
| I-802 | A | C | | | 2103.9474 | 2106 | 2104.2 | |
| I-803 | A | A | | | 2080.9586 | 2082.9 | 2081 | |
| I-804 | A | A | | | 2259.0421 | 2261.1 | 2259.4 | |
| I-805 | A | B | | + | 2259.0421 | 2261.1 | 2259 | |
| I-806 | A | B | | + | 2372.1261 | 2374.2 | 2371.9 | |
| I-807 | A | C | | | 2330.0792 | 2332.1 | 2330.3 | |
| I-808 | B | | | | 2443.1632 | 2445.3 | 2442.9 | |
| I-809 | B | | | | 2443.1632 | 2445.3 | 2443.4 | |
| I-810 | B | | | | 2556.2473 | 1280 | 1278.2 | |
| I-811 | B | | | | 2556.2473 | 1280 | 1278 | |
| I-812 | A | B | | + | 2613.2688 | 1308.4 | 1306.7 | |
| I-813 | A | B | | + | 2684.3059 | 1344 | 1342.1 | |
| I-814 | A | C | | + | 2625.3052 | 1314.4 | 1312.7 | |
| I-815 | A | C | | + | 2696.3423 | 1350 | 1348.4 | |
| I-816 | A | A | | + | 2611.2644 | 1307.4 | 1305.9 | |
| I-817 | A | B | | + | 2682.3015 | 1342.9 | 1341.3 | |
| I-818 | A | D | | | 2155.9424 | 2157.8 | 2155.4 | A |
| I-819 | B | | | | 2074.9209 | 2076.8 | 2074.9 | |
| I-820 | A | C | | | 2150.9675 | 2153.2 | 2151.2 | |
| I-821 | A | | | | 2150.9675 | 2152.9 | 2151.1 | |
| I-822 | A | B | | | 2237.9995 | 2240.2 | 2238.2 | |
| I-823 | A | C | | | 2134.8862 | 2137.9 | 2135.9 | |
| I-824 | A | | | | 2162.9175 | 2166 | 2164.7 | |
| I-825 | A | C | | | 2162.9175 | 2165.6 | 2163.9 | |
| I-826 | A | C | | | 2249.9495 | 2252.8 | 2250.7 | |
| I-827 | A | C | | | 2176.9331 | 2180.1 | 2178.8 | |
| I-828 | B | | | | 2176.9331 | 1090.6 | 1088.7 | |
| I-829 | B | | | | 2263.9652 | 2267.1 | 2265.4 | |
| I-830 | B | | | | 2263.9652 | 1134.1 | 1132.5 | |
| I-831 | A | C | | | 2066.8988 | 2069.8 | 2068.2 | |
| I-832 | A | C | | | 2066.8988 | 1035.5 | 1034.1 | |
| I-833 | A | C | | | 2094.9301 | 2097.8 | 2096.2 | |
| I-834 | A | B | | | 2094.9301 | 1049.5 | 1047.1 | |
| I-835 | A | C | | | 2181.9621 | 2184.9 | 2183.1 | |
| I-836 | A | C | | | 2181.9621 | 1093.2 | 1090.8 | |
| I-837 | A | C | | | 2108.9458 | 2112 | 2109.4 | |
| I-838 | A | C | | | 2108.9458 | 2111.8 | 2109.3 | |
| I-839 | A | B | | | 2195.9778 | 2198.9 | 2197.2 | |
| I-840 | A | C | | | 2195.9778 | 2198.9 | | |
| I-841 | A | B | | | 2162.9522 | 2165.3 | 2163.4 | |
| I-842 | A | B | | | 2122.9209 | 2125.2 | 2123.2 | |
| I-843 | A | B | | | 2134.9209 | 2137.2 | 2135 | |
| I-844 | A | B | | | 2160.9365 | 2163.2 | 2160.9 | |
| I-845 | A | C | | | 2244.9365 | 1124.3 | 1122.7 | |
| I-846 | A | C | | | 2174.9522 | 2177.3 | 2175.9 | |
| I-847 | A | C | | | 2146.9209 | 2149.2 | 2147.1 | |
| I-848 | A | C | | | 2134.9209 | 2137.2 | 2135.3 | |
| I-849 | A | | | | 2100.9365 | 2102.9 | 2101.2 | |
| I-850 | A | B | | | 2126.9522 | 2129.1 | 2127.1 | |
| I-851 | A | | | | 2210.9522 | 2213.2 | 2210.8 | |
| I-852 | A | B | | | 2140.9678 | 2143.3 | 2141.1 | |
| I-853 | A | | | | 2140.9678 | 2142.9 | 2140.9 | |
| I-854 | A | | | | 2112.9365 | 2115.2 | 2112.9 | |
| I-855 | A | | | | 2100.9365 | 2102.9 | 2101.1 | |
| I-856 | A | | | | 2072.9052 | 2074.9 | 2073.2 | |
| I-857 | A | | | | 2098.9209 | 2101.2 | 2098.8 | |
| I-858 | A | | | | 2182.9209 | 1093.3 | 1091.3 | |
| I-859 | A | B | | | 2112.9365 | 2115.1 | 2112.9 | |
| I-860 | A | C | | | 2084.9052 | 2086.9 | 2084.9 | |
| I-861 | A | C | | | 2072.9052 | 1038.2 | 1036.8 | |
| I-862 | A | B | | | 2077.8647 | 2080.7 | 2078.9 | |
| I-863 | A | | | | 2077.8647 | 2080.8 | 2079.5 | |
| I-864 | A | C | | | 2174.9175 | 1089.7 | 1087 | |
| I-865 | A | C | | | 2164.8968 | 1084.6 | 1082.6 | |
| I-866 | B | | | | 2224.9331 | 2228.3 | 2226.2 | |
| I-867 | A | A | | + | 2015.8338 | 1010.2 | 1008 | |
| I-868 | A | C | | + | 2112.8865 | 2116.2 | 2113.3 | |
| I-869 | A | B | | + | 2102.8658 | 2105.9 | 2103.4 | |
| I-870 | A | C | | | 2162.9022 | 2166.4 | 2164 | |
| I-871 | A | A | | + | 2009.8773 | 2013.5 | 2010.8 | |
| I-872 | A | C | | + | 2106.9301 | 2110 | 2108.5 | |
| I-873 | A | B | | | 2096.9094 | 2099.9 | 2098.3 | |
| I-874 | A | C | | | 2156.9458 | 2159.8 | 2158.3 | |
| I-875 | A | | | | 2038.8821 | 2041 | 2039.2 | |
| I-876 | A | | | | 2109.9192 | 2112.1 | 2110.2 | |
| I-877 | A | | | | 2238.9982 | 2241.2 | 2239.3 | |
| I-878 | A | | | | 2032.9256 | 2035 | 2033.1 | |
| I-879 | A | | | | 2103.9628 | 1053.8 | 1052 | |
| I-880 | A | | | | 2233.0417 | 2235.2 | 2233.5 | |
| I-881 | A | | | | 2050.832 | 2053.8 | 2052.9 | |
| I-882 | A | | | | 2121.8692 | 2124.8 | 2123.3 | |
| I-883 | A | | | | 2250.9481 | 2254 | 2252.6 | |
| I-884 | A | | | | 2044.8756 | 1024.6 | 1023 | |
| I-885 | A | | | | 2115.9127 | 2118.8 | 2117.4 | |
| I-886 | A | | | | 2244.9917 | 2247.9 | 2246.1 | |
| I-887 | A | | | | 2100.913 | 2103 | 2101.1 | |
| I-888 | B | | | | 2301.0291 | 1152.4 | 1150.4 | |
| I-889 | B | | | | 2301.0291 | 1152.4 | 1150.6 | |
| I-890 | A | | | | 2112.863 | 2115.8 | 2113.9 | |
| I-891 | A | C | | | 2112.863 | 1058.7 | 1057 | |
| I-892 | A | D | | | 2183.9001 | 1094.2 | 1091.8 | |
| I-893 | B | | | | 2312.9791 | 1158.8 | 1156.7 | |
| I-894 | A | C | | | 2018.91 | 2021 | 2019.3 | |
| I-895 | A | | | | 2018.91 | 2021.1 | 2019.3 | |
| I-896 | A | C | | | 2089.9471 | 2092.1 | 2090.2 | |
| I-897 | A | | | | 2089.9471 | 2092.1 | 2090.2 | |
| I-898 | A | C | | | 2219.0261 | 2221.3 | 2219.3 | |
| I-899 | A | | | | 2219.0261 | 1111.5 | 1109.5 | |
| I-900 | A | D | | | 2094.9413 | 2097.1 | 2095.2 | |
| I-901 | A | D | | | 2165.9784 | 2168.2 | 2166.3 | |
| I-902 | B | | | | 2295.0574 | 1149.4 | 1147.6 | |
| I-903 | A | D | | ++ | 2178.9332 | 1091.4 | 1089.5 | |
| I-904 | A | C | | | 2177.9379 | 2180.2 | 2178.1 | |
| I-905 | A | | | | 2177.9379 | 1090.8 | 1089 | |
| I-906 | A | | | | 2176.9427 | 1090.4 | 1087.9 | |
| I-907 | A | | | | 2138.927 | 2141.2 | 2139.4 | |
| I-908 | A | B | | + | 2179.9787 | 1091.9 | 1089.8 | |
| I-909 | A | C | | | 2138.927 | 2141.2 | 2139.4 | |
| I-910 | A | | | | 2138.927 | 2141.2 | 2139.4 | |
| I-911 | A | | | | 2138.927 | 2141.2 | 2139 | |
| I-912 | A | | | | 2138.927 | 2141.4 | 2139.7 | |
| I-913 | A | B | | | 2086.8709 | 2090.1 | 2089.3 | |
| I-914 | A | C | | | 2086.8709 | 1045.8 | 1044.2 | |
| I-915 | A | C | | | 2215.9499 | 2219 | 2217.6 | |
| I-916 | A | C | | | 2215.9499 | 1110.3 | 1108.6 | |
| I-917 | A | C | | | 2114.9022 | 2118 | 2116.6 | |
| I-918 | A | C | | | 2114.9022 | 2118.2 | 2116.3 | |
| I-919 | A | C | | | 2148.8865 | 2151.2 | 2150.3 | |
| I-920 | A | C | | | 2148.8865 | 2152 | 2150.1 | |
| I-921 | B | C | | | 2092.8273 | 2095.6 | 2093.9 | |
| I-922 | A | C | | | 2092.8273 | 2095.6 | 2093.9 | |
| I-923 | A | B | | | 2003.8838 | 2005.7 | 2003.5 | |
| I-924 | A | C | | | 2003.8838 | 2006.2 | 2004.4 | |
| I-925 | A | B | | | 2203.9999 | 2205.9 | 2204.1 | |
| I-926 | A | C | | | 2102.9522 | 2105.3 | 2103.4 | |
| I-927 | A | B | | | 2136.9365 | 2138.9 | 2136.9 | |
| I-928 | E | | | | 2106.9624 | 1055.3 | 1053.6 | |
| I-929 | C | | | | 2087.9525 | 2090.1 | 2088.1 | |
| I-930 | C | | | | 2087.9525 | 1045.8 | 2088.1 | |
| I-931 | E | | | | 2112.9188 | 1057.7 | 2112.5 | |
| I-932 | E | | | | 2036.9052 | 2039.1 | 2037.1 | A |
| I-933 | E | | | | 2036.8147 | 2039 | 2037.2 | |
| I-934 | E | | | | 2040.846 | 2042.7 | 2041 | A |
| I-935 | B | D | | | 2088.9365 | 2091.3 | 2089.2 | |
| I-936 | B | D | | | 2063.0114 | 2065.2 | 2063.2 | |
| I-937 | B | D | | | 2063.0114 | 2065.3 | 2063.2 | |
| I-938 | B | | | | 2077.0271 | 2079.3 | 2077.8 | |
| I-939 | C | | | | 2077.0271 | 1040.4 | 2077.2 | |
| I-940 | A | C | | | 2124.9365 | 2127.4 | 2125.3 | |
| I-941 | A | | | | 2124.9365 | 2127.3 | 2125.2 | |
| I-942 | A | D | | | 2074.9614 | 2077.9 | 2075.2 | |
| I-943 | B | | | | 2088.9771 | 1046.8 | 1044.9 | |
| I-944 | A | D | | | 2088.9771 | 1046.8 | 2090.1 | |
| I-945 | A | C | | | 2136.8865 | 2140.4 | 2138.5 | |
| I-946 | A | | | | 2136.9519 | 2139.2 | 2137.2 | |
| I-947 | A | D | | | 2060.9052 | 2063.3 | 2061.9 | |
| I-948 | A | D | | | 2074.9209 | 2077.2 | 2076.4 | |
| I-949 | B | | | | 2144.9958 | 2147 | 2145.1 | |
| I-950 | B | | | | 2156.9458 | 2159.7 | 2157.6 | |
| I-951 | B | | | | 2156.9458 | 2159.8 | 2157.4 | |
| I-952 | C | | | | 2274.0748 | 2276.2 | 2274.3 | |
| I-953 | C | | | | 2274.0748 | 2276.2 | 2274 | |
| I-954 | C | | | | 2286.0247 | 2289 | 2288.2 | |
| I-955 | B | B | | | 2178.0748 | 1091 | 2178.7 | |
| I-956 | A | | | | 2190.0247 | 1097.3 | 2191.4 | |
| I-957 | A | C | | | 2074.9209 | 1039.3 | 1037.6 | |
| I-958 | E | | | | 2088.9365 | 1046.3 | 1044.4 | |
| I-959 | E | | | | 2088.9365 | 1046.3 | 1044.4 | |
| I-960 | E | | | | 2088.9365 | 1046.3 | 1044.5 | |
| I-961 | A | D | | | 2088.9365 | 2091.1 | 2089.1 | |
| I-962 | E | | | | 2088.9365 | 2191.2 | 2089.2 | |
| I-963 | B | | | | 2078.9522 | 1041.3 | 1039.4 | A |
| I-964 | E | | | | 2092.9678 | 2095.1 | 2093.2 | A |
| I-965 | C | | | | 2092.9678 | 2095.2 | 2093.8 | A |
| I-966 | E | | | | 2092.9678 | 2095.3 | 2093.2 | A |
| I-967 | B | | | | 2092.9678 | 2095.2 | 2092.9 | |
| I-968 | E | | | | 2091.9838 | 2094.2 | 2091.7 | |
| I-969 | A | A | | | 2046.8896 | | | |
| I-970 | A | B | | + | 2046.8896 | | | |
| I-971 | A | B | | | 2074.9209 | | | |
| I-972 | A | | | | 2088.9365 | | | |
| I-973 | A | | | | 2088.9365 | | | |
| I-974 | A | | | | 2088.9365 | | | |
| I-975 | A | | | | 2116.9678 | | | |
| I-976 | A | | | | 2072.9052 | | | |
| I-977 | A | | | | 2072.9052 | | | |
| I-978 | A | | | | 2100.9365 | | | |
| I-979 | A | | | | 2114.9522 | | | |
| I-980 | A | | | | 2142.9835 | | | |
| I-981 | A | | | | 2142.9835 | | | |
| I-982 | A | B | | + | 2156.9052 | 2159.2 | 2157.5 | |
| I-983 | A | B | | | 2156.9052 | 2159.3 | 2157.2 | |
| I-984 | A | B | | + | 2184.9365 | 1094.4 | 2185.9 | |
| I-985 | A | A | | | 2198.9522 | 1101.4 | 1099.6 | |
| I-986 | A | A | | + | 2198.9522 | 2201.3 | 2198.9 | |
| I-987 | A | B | | + | 2058.8896 | 2061.1 | 2059.3 | |
| I-988 | A | B | | + | 2086.9209 | 2089.2 | 2087.6 | |
| I-989 | A | C | | + | 2100.9365 | 2103.2 | 2101.2 | |
| I-990 | A | C | | | 2100.9365 | 2103.2 | 2101.4 | |
| I-991 | A | | | +++ | 2128.9678 | 2131.3 | 2129.2 | |
| I-992 | E | | | | 2032.8739 | 2035.2 | 2033.2 | |
| I-993 | D | | | | 2008.8739 | 2011.1 | 2009.5 | |
| I-994 | A | | | | 2058.8896 | 2061.3 | 2059 | |
| I-995 | A | | | | 2058.8896 | 2061.2 | 2059.3 | |
| I-996 | A | B | | | 2072.9052 | 2075.2 | 2073.3 | |
| I-997 | A | | | | 2116.9315 | 2119.4 | 2116.8 | |
| I-998 | A | C | | | 2116.9315 | 2119.4 | 2116.8 | |
| I-999 | A | C | | | 2072.9052 | 2075.4 | 2073.7 | |
| I-1000 | A | | | | 2142.8896 | 2145.3 | 2142.6 | |
| I-1001 | A | | | | 2142.8896 | 2145.3 | 2142.4 | |
| I-1002 | A | | | | 2156.9052 | 2159.2 | 2157.3 | |
| I-1003 | A | | | | 2156.9052 | 2159.3 | 2157.4 | |
| I-1004 | A | C | | | 2186.9158 | 2189.3 | 2187 | |
| I-1005 | A | | | | 2200.9315 | 2203.4 | 2201 | |
| I-1006 | A | D | | | 2200.9315 | 2203.4 | 2200.9 | |
| I-1007 | A | | | | 2200.9315 | 2203.4 | 2201.2 | |
| I-1008 | A | C | | | 2156.9052 | 2159.4 | 2156.9 | |
| I-1009 | A | C | | | 2156.9052 | 2159.3 | 2157.4 | |
| I-1010 | A | B | | | 2072.8552 | 2076.9 | 2075.3 | |
| I-1011 | A | | | | 2116.9315 | 2119.2 | 2116.6 | |
| I-1012 | A | B | | | 2152.9315 | 2155.3 | 2153 | |
| I-1013 | A | C | | | 2104.9315 | 2107.2 | 2105.5 | |
| I-1014 | A | C | | | 2086.9209 | 2089.2 | 2087.6 | |
| I-1015 | A | C | | | 2122.9209 | 2125.3 | 2123.2 | |
| I-1016 | A | D | | | 2074.9209 | 2077.2 | 2075.1 | |
| I-1017 | A | D | | | 2142.9835 | 2145.5 | 2143.2 | |
| I-1018 | A | C | | | 2178.9835 | 2181.4 | 2178.9 | |
| I-1019 | B | D | | | 2130.9835 | 2133.4 | 2131.9 | |
| I-1020 | A | C | | | 2130.9471 | 2133.3 | 2131.7 | |
| I-1021 | B | D | | | 2118.9471 | 2121.3 | 2119.3 | |
| I-1022 | B | | | | | | | A |
| I-1023 | A | D | | | 2060.9052 | 2061.9 | 2061.9 | |
| I-1024 | E | | | | 2043.8651 | 2047.4 | 2045.4 | |
| I-1025 | F | | | | 2208.0100 | 2210.6 | 2208.4 | |
| I-1026 | A | D | | | 2157.9580 | 2160.5 | 2158.5 | |
| I-1027 | A | D | | +++ | 2157.9580 | 2060.5 | 2158.0 | |
| I-1028 | A | D | | | 2219.9737 | 2222.7 | 2220.6 | |
| I-1029 | A | | | | 2219.9737 | 2222.6 | 2220.8 | |
| I-1030 | A | | | | 2200.0050 | 2202.7 | 2201.0 | |
| I-1031 | B | | | | 2143.9424 | 1074.0 | 1072.0 | |
| I-1032 | B | | | | 2205.9580 | 1105.0 | 1102.9 | |
| I-1033 | B | | | | 2185.9893 | 1095.0 | 1092.9 | |
| I-1034 | A | | | | 2143.9424 | 2146.4 | 2144.9 | |
| I-1035 | A | | | | 2205.9580 | 1105.1 | 1103.3 | |
| I-1036 | A | | | | 2185.9893 | 2188.6 | 2185.9 | |
| I-1037 | A | | | + | 2027.8338 | 2031.1 | 2029.4 | |
| I-1038 | A | | | + | 2041.8494 | 2044.9 | 2043.6 | |
| I-1039 | A | | | | 2041.8494 | 2044.9 | 2043.6 | |
| I-1040 | A | | | + | 2027.8338 | 2031.0 | 2029.4 | |
| I-1041 | A | | | | 2027.8338 | 2031.1 | 2029.3 | |
| I-1042 | A | | | + | 2041.8494 | 2045.2 | 2042.2 | |
| I-1043 | A | | | | 2041.8494 | 2045.1 | 2043.3 | |
| I-1044 | A | | | + | 2053.8494 | 2056.9 | 2054.4 | |
| I-1045 | A | | | | 2053.8494 | 2057.1 | 2054.9 | |
| I-1046 | A | | | | 2067.8651 | 2071.4 | 2069.4 | |
| I-1047 | A | | | + | 2067.8651 | 2071.2 | 2068.5 | |
| I-1048 | A | | | + | 2021.8773 | 2025.2 | 2023.2 | |
| I-1049 | A | | | | 2021.8773 | 2025.4 | 2024.6 | |
| I-1050 | A | | | + | 2035.8930 | 2039.0 | 2037.3 | |
| I-1051 | A | | | | 2035.8930 | 2039.1 | 2036.8 | |
| I-1052 | A | | | + | 2021.8773 | 2024.9 | 2022.7 | |
| I-1053 | A | | | | 2021.8773 | 2025.0 | 2023.7 | |
| I-1054 | A | | | + | 2035.8930 | 2039.1 | 2037.6 | |
| I-1055 | A | | | | 2035.8930 | 2039.6 | 2037.4 | |
| I-1056 | A | | | + | 2047.8930 | 2051.0 | 2049.1 | |
| I-1057 | A | | | | 2047.8930 | 2051.5 | 2049.1 | |
| I-1058 | A | | | ND | 2061.9086 | 2065.1 | 2063.0 | |
| I-1059 | A | | | | 2061.9086 | 2065.0 | 2063.2 | |
| I-1060 | A | | | | 1947.8617 | 1951.0 | 1948.2 | |
| I-1061 | A | | | | 1961.8773 | 1964.9 | 1963.5 | |
| I-1062 | A | | | | 2140.9427 | 2143.5 | 2141.2 | |
| I-1063 | A | | | | 2187.9286 | 2190.2 | 2188.8 | |
| I-1064 | A | | | +++ | 2190.9583 | 2193.6 | 2190.9 | |
| I-1065 | A | | | | 2155.9536 | 2158.5 | 2156.9 | |
| I-1066 | A | | | | 2201.9631 | 2204.8 | 2202.1 | |
| I-1067 | A | D | | | 2151.9474 | 2154.7 | 2152.7 | |
| I-1068 | A | | | | 2141.9379 | 1073.0 | 1070.8 | |
| I-1069 | A | | | | 2140.9427 | 2143.5 | 2141.6 | |
| I-1070 | A | | | | 2165.9631 | 2168.8 | 2167.7 | |
| I-1071 | A | | | +++ | 2165.9631 | 1082.2 | 1093.4 | |
| I-1072 | A | | | | 2165.9631 | 2168.7 | 2167.0 | |
| I-1073 | A | | | | 2152.9427 | 2155.6 | 2154.1 | |
| I-1074 | A | | | | 2157.9580 | 2160.3 | 2158.4 | |
| I-1075 | A | | | +++ | 2141.9379 | 2144.3 | 2142.2 | |
| I-1076 | A | D | | | 2190.9583 | 2193.8 | 2191.4 | |
| I-1077 | A | | | | 2190.9583 | 2193.6 | 2191.6 | |
| I-1078 | A | | | +++ | 2117.9631 | 2120.7 | 2118.1 | |
| I-1079 | A | | | +++ | 2187.0209 | 2190.0 | 2187.8 | |
| I-1080 | A | | | | 2187.0209 | 1095.6 | 1093.4 | |
| I-1081 | A | | | +++ | 2173.0053 | 2175.6 | 2173.5 | |
| I-1082 | A | | | | 2173.0053 | 2175.8 | 2173.8 | |
| I-1083 | A | | | | 2176.9097 | 1090.6 | 1088.6 | |
| I-1084 | A | | | | 2176.9097 | 1090.6 | 1088.9 | |
| I-1085 | A | | | | 2223.9144 | 2226.5 | 2224.2 | |
| I-1086 | A | | | | 2025.8293 | 2029.1 | | |
| I-1087 | A | | | | 2025.8293 | 2029.0 | 2027.8 | |
| I-1088 | A | | | | 2096.8665 | 2100.2 | | |
| I-1089 | A | | | | 2011.8137 | 2015.0 | 2012.6 | |
| I-1090 | A | | | | 2073.8293 | 2077.1 | 2074.9 | |
| I-1091 | A | | | | 2144.8665 | 2148.2 | | |
| I-1092 | A | | | | 2019.8729 | 2023.1 | 2020.6 | |
| I-1093 | A | | | | 2090.9100 | 2094.7 | 2092.3 | |
| I-1094 | A | | | | 2005.8573 | 2009.1 | | |
| I-1095 | A | | | | 2076.8944 | 2080.1 | 2078.2 | |
| I-1096 | A | | | | 2067.8729 | 2071.2 | 2069.4 | |
| I-1097 | A | | | | 2138.9100 | 2142.1 | 2140.5 | |
| I-1098 | A | | | | 1975.9430 | 1978.2 | 1976.6 | |
| I-1099 | A | | | | 2032.9645 | 2035.3 | 2033.8 | |
| I-1100 | A | | | | 1961.9274 | 1964.2 | 1962.8 | |
| I-1101 | A | | | | 2094.9801 | 2097.3 | 2095.4 | |
| I-1102 | A | | | + | 2023.9430 | 2026.3 | 2024.9 | |
| I-1103 | A | | | + | 1969.9866 | 1972.3 | 1970.1 | |
| I-1104 | A | | | | 2027.0081 | 2029.3 | 2027.7 | |
| I-1105 | A | | | | 1955.9709 | 1958.2 | 1956.5 | |
| I-1106 | A | | | + | 2089.0237 | 2091.4 | 2089.3 | |
| I-1107 | A | | | + | 2017.9866 | 2020.3 | 2018.6 | |
| I-1108 | A | | | + | 2111.8338 | 2115.3 | 2113.8 | |
| I-1109 | A | | | | 2182.8709 | 2186.3 | 2185.1 | |
| I-1110 | A | | | | 2198.8658 | 2202.1 | 2200.3 | |
| I-1111 | A | | | + | 2097.8181 | 2101.6 | 2099.3 | |
| I-1112 | A | | | | 2168.8552 | 2172.1 | 2170.3 | |
| I-1113 | A | | | | 2184.8501 | 2188.3 | 2185.9 | |
| I-1114 | A | | | | 2173.8494 | 2178.2 | 2176.5 | |
| I-1115 | A | | | | 2244.8865 | 2247.5 | | |
| I-1116 | A | | | | 2260.8814 | 1032.9 | 1030.7 | |
| I-1117 | A | | | + | 2137.8494 | 1071.3 | 2139.3 | |
| I-1118 | A | | | + | 2208.8865 | 1106.8 | 2210.1 | |
| I-1119 | A | | | | 2224.8814 | 2228.1 | 2226.4 | |
| I-1120 | A | | | | 2126.9634 | 2129.4 | 2127.3 | |
| I-1121 | A | | | | 2126.9634 | 2129.4 | 2127.4 | |
| I-1122 | B | | | | 2098.9321 | 2103.4 | 2101.6 | |
| I-1123 | B | | | | 2098.9321 | 2103.4 | 2101.8 | |
| I-1124 | A | | | | 2110.9685 | 2113.4 | | |
| I-1125 | A | | | | 2082.9372 | 2085.3 | 2083.4 | |
| I-1126 | A | | | | 2111.9274 | 2114.3 | 2111.9 | |
| I-1127 | A | | | | 2111.9274 | 2114.3 | 2112.1 | |
| I-1128 | A | D | | | 2163.9686 | 2166.4 | 2164.3 | |
| I-1129 | A | D | | | 2163.9686 | 2166.4 | 2164.6 | |
| I-1130 | E | D | | | 2176.0050 | 2155.9 | 2154.0 | |
| I-1131 | E | D | | | 2176.0050 | 2114.0 | 2112.7 | |
| I-1132 | A | D | | | 2190.0206 | 2192.6 | 2190.7 | |
| I-1133 | A | D | +++ | | 2190.0206 | 2192.5 | 2190.6 | |
| I-1134 | A | D | +++ | | 2177.9842 | 2180.5 | 2178.6 | |
| I-1135 | A | D | | | 2177.9842 | 2180.5 | 2179.0 | |
| I-1136 | A | D | | | 2224.0050 | 2226.5 | 2224.7 | |
| I-1137 | B | D | | | 2224.0050 | 2226.6 | 2224.9 | |
| I-1138 | A | D | | | 2245.0264 | 2247.5 | 2245.3 | |
| I-1139 | A | D | | | 2245.0264 | 2247.6 | 2245.8 | |
| I-1140 | A | D | | | 2235.0057 | 2237.5 | 2235.2 | |
| I-1141 | A | D | | | 2235.0057 | 1119.6 | 1117.7 | |
| I-1142 | A | D | | | 2219.0108 | 2221.5 | 2219.9 | |
| I-1143 | A | D | | | 2219.0108 | 2221.5 | 2219.4 | |
| I-1144 | A | D | | +++ | 2167.9999 | 2170.5 | 2168.6 | A |
| I-1145 | A | D | ++ | + | 2180.0363 | 2180.6 | 2178.6 | A |
| I-1146 | A | D | | + | 2194.0519 | 2196.4 | 2194.1 | A |
| I-1147 | A | D | | +++ | 2182.0155 | 2184.5 | 2182.4 | A |
| I-1148 | A | D | | | 2228.0363 | 2230.4 | 2228.5 | A |
| I-1149 | B | D | | +++ | 2249.0577 | 2251.4 | 2249.6 | A |
| I-1150 | A | D | | +++ | 2239.0370 | 2241.5 | 2239.0 | A |
| I-1151 | A | D | | +++ | 2223.0421 | 2225.3 | 2223.4 | A |
| I-1152 | | | | | 2058.9624 | 2061.4 | 2059.2 | |
| I-1153 | E | | | | 2086.9937 | 2089.2 | 2087.3 | |
| I-1154 | E | | | | 2162.9344 | 2165.5 | 2163.2 | |
| I-1155 | A | | | + | 2586.2076 | 1295.1 | 1293.5 | |
| I-1156 | A | | | + | 2671.2716 | 1337.6 | 1336.2 | |
| I-1157 | A | | | + | 2671.2716 | 1337.7 | 1335.9 | |
| I-1158 | A | | | + | 2615.2593 | 1309.7 | 1307.7 | |
| I-1159 | A | | | | 2598.1963 | 1301.0 | 1299.2 | |
| I-1160 | A | | | | 2669.2335 | 1336.6 | 1334.5 | |
| I-1161 | B | | | | 2123.0114 | 2125.4 | 2123.0 | |
| I-1162 | A | | | +++ | 2002.8998 | 2005.3 | 2003.7 | |
| I-1163 | A | | | +++ | 2098.8998 | 2101.4 | | |
| I-1164 | A | | | +++ | 2169.9369 | 2172.5 | 2170.7 | |
| I-1165 | A | | | +++ | 1988.8841 | 1991.3 | 1989.3 | |
| I-1166 | A | | | +++ | 1988.8841 | 1991.3 | 1989.6 | |
| I-1167 | A | | | +++ | 2059.9212 | 2062.3 | 2060.0 | |
| I-1168 | A | | | +++ | 2059.9212 | 2062.4 | 2060.4 | |
| I-1169 | A | | | +++ | 2075.9161 | 2078.3 | 2076.3 | |
| I-1170 | A | | | +++ | 2075.9161 | 2078.4 | 2076.5 | |
| I-1171 | A | | | +++ | 2008.8933 | 2012.0 | | |
| I-1172 | A | | | +++ | 2008.8933 | 2012.0 | 2009.9 | |
| I-1173 | A | | | +++ | 2079.9304 | 2083.1 | 2081.2 | |
| I-1174 | A | | | +++ | 2079.9304 | 2083.1 | 2081.4 | |
| I-1175 | A | | | +++ | 2104.8933 | 1054.7 | | |
| I-1176 | A | | | | 2104.8933 | 2108.1 | 2106.7 | |
| I-1177 | A | | | +++ | 2175.9304 | 1090.3 | 2176.1 | |
| I-1178 | A | | | +++ | 1994.8777 | 1998.0 | 1996.3 | |
| I-1179 | A | | | | 1994.8777 | 1998.0 | 1996.3 | |
| I-1180 | A | | | +++ | 2065.9148 | 2069.1 | 2066.7 | |
| I-1181 | A | | | +++ | 2350.0942 | 2352.7 | 2351.1 | |
| I-1182 | A | | | +++ | 2526.1990 | 1265.1 | 1263.5 | |
| I-1183 | A | | | + | 2878.4087 | 1441.3 | 1439.5 | |
| I-1184 | A | | | +++ | 2251.0258 | 2253.6 | 2251.6 | |
| I-1185 | A | | | +++ | 2427.1306 | 2429.8 | 2427.8 | |
| I-1186 | A | | | +++ | 2779.3403 | 1391.8 | 1389.8 | |
| I-1187 | A | | | +++ | 3131.5500 | 1568.0 | 1566.2 | |
| I-1188 | B | | | | 2074.9380 | 1039.3 | 1037.7 | |
| I-1189 | B | | | | 2074.9380 | 1039.2 | 1037.2 | |
| I-1190 | B | | | | 2074.9380 | 2077.1 | 2075.7 | |
| I-1191 | C | | | | 2161.9893 | 2164.4 | | |
| I-1192 | C | | | | 2161.9893 | 2164.4 | 2162.1 | |
| I-1193 | C | | | | 2146.9896 | 2149.6 | 2147.7 | |
| I-1194 | B | | | | 2146.9896 | 2149.1 | 2147.5 | |
| I-1195 | C | | | | 2119.9787 | 2122.4 | 2120.6 | |
| I-1196 | C | | | | 2119.9787 | 2122.3 | 2120.4 | |
| I-1197 | B | | | | 2133.9944 | 2136.4 | | |
| I-1198 | E | | | | 2133.9944 | 2136.4 | 2134.6 | |
| I-1199 | B | | | | 2161.9893 | 2164.4 | 2162.2 | |
| I-1200 | C | | | | 2161.9893 | 2164.5 | 2162.3 | |
| I-1201 | C | | | | 2146.9896 | 2149.4 | 2147.3 | |
| I-1202 | C | | | | 2146.9896 | 2149.4 | 2147.3 | |
| I-1203 | C | | | | 2119.9787 | 2122.3 | 2120.4 | |
| I-1204 | E | | | | 2119.9787 | 2122.4 | 2120.3 | |
| I-1205 | E | | | | 2133.9944 | 2136.4 | 2134.6 | |
| I-1206 | E | | | | 2133.9944 | 2136.4 | 2134.0 | |
| I-1207 | E | | | | 2176.0050 | 2178.4 | 2176.3 | |
| I-1208 | E | | | | 2176.0050 | 2178.4 | 2176.6 | |
| I-1209 | E | | | | 2219.9948 | 2222.4 | 2220.6 | |
| I-1210 | D | | | | 2219.9948 | 2222.4 | 2220.3 | |
| I-1211 | A | | | | 2219.9948 | 2222.5 | 2221.1 | |
| I-1212 | A | | | | 2219.9948 | 2223.3 | 2221.3 | |
| I-1213 | B | D | | | 2064.9729 | 2067.3 | 2065.6 | A |
| I-1214 | B | D | | | 2107.0199 | 2109.3 | 2107.3 | A |
| I-1215 | A | D | | | 2064.9729 | 2067.4 | 2064.8 | A |
| I-1216 | B | D | | | 2078.9886 | 2181.4 | 2179.3 | A |
| I-1217 | C | | | +++ | 2166.0206 | 2168.5 | 2166.2 | A |
| I-1218 | B | | | | 2151.0209 | 2153.6 | 2151.5 | A |
| I-1219 | E | | | | 2124.0100 | 2126.6 | 2124.7 | A |
| I-1220 | C | | | | 2138.0257 | 2140.4 | 2137.9 | A |
| I-1221 | D | | | +++ | 2166.0206 | 2168.5 | 2166.9 | A |
| I-1222 | C | | | | 2151.0209 | 2153.4 | 2151.3 | A |
| I-1223 | E | | | | 2124.0100 | 2126.4 | 2124.4 | A |
| I-1224 | E | | | | 2138.0257 | 2140.4 | 2138.5 | A |
| I-1225 | E | | | | 2180.0363 | 2182.4 | 2180.2 | A |
| I-1226 | D | | | | 2224.0261 | 2226.5 | 2224.4 | A |
| I-1227 | B | | | | 2224.0261 | 2226.5 | | A |
| I-1228 | E | | | | 2238.0417 | 2240.8 | 2238.9 | A |
| I-1229 | A | | | | 2157.9985 | 2161.2 | 2158.8 | A |
| I-1230 | A | | | + | 2086.9614 | 2090.4 | 2088.6 | A |
| I-1231 | A | | | + | 2163.9549 | 2167.1 | | A |
| I-1232 | A | | | + | 2092.9178 | 2096.0 | 2094.3 | A |
| I-1233 | A | | | | 2143.9829 | 2147.1 | 2145.4 | A |
| I-1234 | A | | | | 2072.9458 | 1038.8 | 1037.1 | A |
| I-1235 | A | | | | 2101.9359 | 1053.3 | 1051.3 | A |
| I-1236 | A | | | | 2030.8988 | 2033.9 | 2032.4 | A |
| I-1237 | A | | | | 2177.9672 | 2181.2 | 2180.2 | A |
| I-1238 | A | | | | 2106.9301 | 2110.4 | 2108.2 | A |
| I-1239 | A | | | | 2129.9672 | 2133.0 | 2131.5 | A |
| I-1240 | B | | | | 2058.9301 | 1031.7 | 2060.5 | A |
| I-1241 | A | | | | 2130.9413 | 1067.8 | 1066.0 | |
| I-1242 | A | | | | 1997.9274 | 2000.1 | 1998.1 | |
| I-1243 | A | | | | 1983.9117 | 1986.1 | 1984.5 | |
| I-1244 | A | | | | 2054.9488 | 2057.2 | 2055.1 | |
| I-1245 | A | | | | 2015.9179 | 2018.2 | 2016.2 | |
| I-1246 | A | | | | 2015.9179 | 2018.2 | 2016.8 | |
| I-1247 | A | | | | 2086.9551 | 2089.2 | 2087.1 | |
| I-1248 | A | | | | 2031.8884 | 2034.6 | 2032.3 | |
| I-1249 | A | | | | 2102.9255 | 2105.8 | 2104.4 | |
| I-1250 | A | | | | 2011.9430 | 2085.3 | 2083.3 | |
| I-1251 | A | | | | 2082.9801 | 2014.2 | 2012.6 | |
| I-1252 | A | | | | 2295.0098 | 2298.3 | 2296.0 | |
| I-1253 | A | | | | 2295.0098 | 2298.3 | 2295.8 | |
| I-1254 | A | | | | 2337.0568 | 1170.9 | 1169.2 | |
| I-1255 | A | | | | 2337.0568 | 2340.4 | 2338.6 | |
| I-1256 | A | | | | 2267.0149 | 1135.8 | 2268.1 | |
| I-1257 | A | | | | 2267.0149 | 1135.9 | 1134.3 | |
| I-1258 | A | | | | 2321.0255 | 2324.3 | 2322.0 | |
| I-1259 | A | | | | 2321.0255 | 2324.4 | 2321.8 | |
| I-1260 | A | | | | 2363.0724 | 2366.6 | 2364.3 | |
| I-1261 | A | | | | 2363.0724 | 1183.8 | 1182.1 | |
| I-1262 | A | | | | 2293.0305 | 1148.8 | 1147.0 | |
| I-1263 | A | | | | 2300.9662 | 2304.3 | 2302.7 | |
| I-1264 | A | | | | 2343.0132 | 1173.9 | | |
| I-1265 | A | | | | 2272.9713 | 1138.8 | 1136.2 | |
| I-1266 | A | | | | 2326.9819 | 2330.3 | 2328.5 | |
| I-1267 | A | | | | 2369.0288 | 2372.5 | 2370.3 | |
| I-1268 | A | | | + | 2298.9870 | 1152.0 | 2299.9 | |
| I-1269 | B | | | | 2233.9062 | 1119.0 | 2234.1 | |
| I-1270 | C | | | | 2207.8905 | 1106.0 | 1103.7 | |
| I-1271 | A | | | | 2144.8545 | | | |
| I-1272 | A | | | | 2143.8592 | | | |
| I-1273 | A | | | + | 2158.8701 | 2161.4 | 2159.4 | |
| I-1274 | A | | | + | 2081.8436 | 2084.2 | 2082.0 | |
| I-1275 | A | | | | 2095.8592 | 2098.3 | | |
| I-1276 | A | | | | 2137.8698 | 2140.3 | | |
| I-1277 | A | | | | 2123.8541 | 1063.9 | 1062.0 | |
| I-1278 | A | | | + | 2093.8436 | 2096.3 | 2094.4 | |
| I-1279 | A | | +++ | | 2095.8592 | 2098.4 | 2096.9 | |
| I-1280 | A | | ++ | | 2109.8749 | 2112.4 | 2110.3 | |
| I-1281 | A | | ++ | | 2107.8592 | 2110.4 | | |
| I-1282 | A | | | | 2095.8228 | 2098.3 | 2096.4 | |
| I-1283 | A | | | | 2109.8385 | 1056.8 | 2110.4 | |
| I-1284 | A | | +++ | | 2294.0792 | 2296.6 | 2294.2 | A |
| I-1285 | A | | | | 2338.0690 | 2340.7 | 2339.0 | A |
| I-1286 | B | | | | 2320.0948 | 2322.6 | 2320.3 | A |
| I-1287 | B | | | | 2310.0741 | 2312.8 | 2311.2 | A |
| I-1288 | A | | | | 2354.0639 | 2356.6 | 2354.9 | A |
| I-1289 | B | | | | 2336.0897 | 2338.6 | | A |
| I-1290 | B | D | | + | 2336.1261 | 2338.6 | 2336.4 | A |
| I-1291 | A | D | | + | 2380.1160 | 2282.7 | 2281.1 | A |
| I-1292 | B | | | + | 2362.1418 | 2364.6 | 2362.3 | A |
| I-1293 | B | | | | 2310.0741 | 2312.7 | 2310.7 | A |
| I-1294 | A | | | | 2354.0639 | 2356.5 | | A |
| I-1295 | B | | | | 2336.0897 | 2338.6 | | A |
| I-1296 | B | | | | 2114.9927 | 2118.0 | | A |
| I-1297 | E | | | | 2251.1098 | 2253.6 | 2251.9 | A |
| I-1298 | E | | | | 2265.1254 | 2267.6 | 2265.4 | A |
| I-1299 | B | | +++ | | 2180.0726 | 1092.0 | 1090.4 | A |
| I-1300 | B | | +++ | | 2194.0883 | 2096.5 | 2094.7 | A |
| I-1301 | B | | | | 2090.8980 | 1046.4 | 1044.5 | |
| I-1302 | C | | | | 2090.8980 | 2091.3 | 2089.3 | |
| I-1303 | E | | | | 2106.8752 | 2106.1 | 2104.1 | |
| I-1304 | A | | | | 2063.0114 | 2065.3 | 2063.4 | |
| I-1305 | B | | | | 2082.9801 | 2085.3 | 2083.4 | |
| I-1306 | A | | | | 2036.9594 | 2039.2 | 2037.3 | |
| I-1307 | A | | | | 2074.9614 | 2078.1 | 2076.4 | |
| I-1308 | A | | | | 2094.9301 | 2098.1 | 2096.2 | |
| I-1309 | A | | | | 2048.9094 | 2052.1 | 2050.6 | |
| I-1310 | A | | | | 2048.9958 | 2051.3 | 2049.5 | |
| I-1311 | B | | | | 2068.9645 | 2071.3 | | |
| I-1312 | B | | | | 2068.9645 | 2071.3 | 2069.3 | |
| I-1313 | A | | | | 2022.9437 | 2025.3 | 2023.1 | |
| I-1314 | A | | | | 2060.9458 | 2064.3 | | |
| I-1315 | A | | | | 2080.9145 | 2084.0 | 2081.7 | |
| I-1316 | B | | | | 2034.8937 | 2037.9 | 2036.0 | |
| I-1317 | A | | | | 2060.9958 | 2063.3 | 2061.3 | |
| I-1318 | A | | | | 2075.0114 | 2077.4 | 2075.8 | |
| I-1319 | B | | | | 2089.0271 | 2091.3 | 2089.3 | |
| I-1320 | A | | | | 2072.9458 | 2076.1 | | |
| I-1321 | A | | | | 2086.9614 | 2090.0 | 8087.8 | |
| I-1322 | A | | | | 2100.9771 | 2104.2 | | |
| I-1323 | A | | | | 2046.9801 | 2049.3 | 2047.0 | |
| I-1324 | A | | | | 2060.9958 | 2063.2 | 2061.3 | |
| I-1325 | B | | | | 2075.0114 | 2077.3 | 2075.5 | |
| I-1326 | A | | | | 2058.9301 | 2062.0 | 2060.5 | |
| I-1327 | A | | | | 2072.9458 | 2076.1 | 2074.6 | |
| I-1328 | A | | | | 2086.9614 | 2090.1 | | |
| I-1329 | A | | | | 2075.9737 | 2078.3 | 2076.3 | A |
| I-1330 | C | | | | 2089.9893 | 2092.3 | 2090.0 | A |
| I-1331 | E | | | | 2187.0032 | 2189.4 | 2187.6 | A |
| I-1332 | A | | | | 2101.9893 | 2104.4 | 2101.9 | A |
| I-1333 | C | | | | 2116.0050 | 2118.4 | 2116.2 | A |
| I-1334 | E | | | | 2213.0189 | 2215.3 | 2213.5 | A |
| I-1335 | A | | | | 2072.9458 | 1038.6 | 1036.8 | A |
| I-1336 | B | | | | 2072.9458 | 2076.3 | 2072.8 | A |
| I-1337 | A | | | | 1996.9145 | 1000.6 | 998.8 | A |
| I-1338 | C | | | | 2010.9301 | 1007.6 | 1005.7 | A |
| I-1339 | E | | | | 1995.9304 | 1998.8 | 1995.9 | A |
| I-1340 | C | | | | 2009.9461 | 2012.8 | 2010.8 | A |
| I-1341 | C | | | | 1968.9195 | 1971.7 | 1970.3 | A |
| I-1342 | B | | | | 2114.9927 | 1059.7 | | A |
| I-1343 | B | | | | 2100.9771 | 2104.0 | 2102.0 | A |
| I-1344 | B | | | | 2114.9927 | 1059.8 | | A |
| I-1345 | A | | | + | 2289.1068 | 2291.6 | 2289.9 | |
| I-1346 | A | | | + | 2303.1224 | 2305.6 | 2303.5 | |
| I-1347 | A | | | +++ | 2317.1381 | 2319.6 | 2318.1 | |
| I-1348 | A | | | | 2301.0568 | 2304.4 | 2302.3 | |
| I-1349 | A | | | + | 2315.0724 | 2318.3 | | |
| I-1350 | A | | | + | 2329.0881 | 1166.9 | 1165.2 | |
| I-1351 | A | | | | 2296.9891 | 2300.4 | 2298.5 | |
| I-1352 | A | | | | 2282.9734 | 2286.4 | | |
| I-1353 | A | | | | 2254.9785 | 2258.3 | 2256.6 | |
| I-1354 | A | | | | 2240.9629 | 2244.3 | 2242.8 | |
| I-1355 | A | | | | 2296.0414 | 2299.4 | | |
| I-1356 | A | | | | 2282.0258 | 2285.5 | 2282.8 | |
| I-1357 | A | | | | 2339.0360 | 2342.4 | 2340.0 | |
| I-1358 | A | | | | 2325.0204 | 2328.5 | 2326.8 | |
| I-1359 | A | | | | 2297.0255 | 1150.7 | 1148.8 | |
| I-1360 | A | | | | 2283.0098 | 2286.3 | | |
| I-1361 | A | | | | 2338.0884 | 2341.5 | | |
| I-1362 | A | | | | 2324.0727 | 2327.5 | | |
| I-1363 | B | | +++ | | 2102.9886 | 2105.4 | 2103.5 | |
| I-1364 | B | | +++ | | 2074.9573 | 2077.1 | | |
| I-1365 | A | | +++ | | 2157.8749 | 2060.2 | 2158.1 | |
| I-1366 | C | | +++ | | 2171.8905 | 1087.9 | 1086.2 | |
| I-1367 | A | | | + | 1995.8617 | 1999.0 | 1997.4 | |
| I-1368 | A | | | | 1995.8617 | 1999.1 | | |
| I-1369 | A | | | + | 2009.8773 | 2013.0 | | |
| I-1370 | A | | | + | 2009.8773 | 2012.9 | 2011.5 | |
| I-1371 | A | | | +++ | 2009.8773 | 2013.0 | 2011.4 | |
| I-1372 | A | | | + | 2009.8773 | 2013.0 | 2011.1 | |
| I-1373 | A | | | +++ | 2023.8930 | 2027.0 | | |
| I-1374 | A | | | | 2023.8930 | 1014.2 | 2025.2 | |
| I-1375 | A | | | | 2023.8930 | 2027.1 | 2025.5 | |
| I-1376 | A | | | + | 2024.8519 | 2028.0 | 2026.2 | |
| I-1377 | A | | | | 2024.8519 | 2027.9 | 2026.0 | |
| I-1378 | A | | | | 2038.8675 | 2042.0 | 2040.5 | |
| I-1379 | A | | | | 2050.8675 | 2054.0 | 2052.7 | |
| I-1380 | A | | | | 2064.8832 | 2068.7 | 2066.8 | |
| I-1381 | A | | | | 2064.8832 | 2068.0 | 2066.6 | |
| I-1382 | A | | | | 2064.8832 | 2068.1 | 2066.2 | |
| I-1383 | A | | | | 2064.8832 | 2068.0 | | |
| I-1384 | A | | | | 2064.8832 | 2068.0 | 2066.3 | |
| I-1385 | A | | | | 2064.8832 | 2068.0 | 2066.4 | |
| I-1386 | B | | | | 2157.8749 | 2160.4 | 2158.6 | |
| I-1387 | B | | | | 2158.8701 | 2161.4 | 2159.7 | |
| I-1388 | B | | | | 2095.8592 | 2098.2 | 2096.5 | |
| I-1389 | B | | | | 2107.8592 | 2110.4 | | |
| I-1390 | B | | | | 2171.8905 | 2174.3 | 2172.6 | |
| I-1391 | B | | | | 2137.8698 | 2140.4 | 2138.2 | |
| I-1392 | A | | | | 2316.0635 | 2318.6 | | |
| I-1393 | A | | | | 2308.0414 | 2311.3 | 2309.8 | |
| I-1394 | A | | | | 2387.1006 | 2389.7 | 2388.2 | |
| I-1395 | A | | | | 2379.0786 | 1192.0 | 1190.3 | |
| I-1396 | A | | | | 2011.9212 | 2014.2 | 2011.9 | |
| I-1397 | C | | | | 2067.9474 | 2070.5 | 2068.2 | |
| I-1398 | A | | | | 2207.9160 | 2210.4 | 2208.8 | |
| I-1399 | A | | | | 2137.9505 | 2140.4 | | |
| I-1400 | A | | | | 2088.9365 | 2091.4 | 2089.3 | |
| I-1401 | A | | | | 2088.9365 | 2091.3 | 2089.3 | |
| I-1402 | B | | | | 2492.1684 | 1248.1 | 1246.2 | |
| I-1403 | A | | | | 2668.2733 | 1336.1 | 1334.8 | |
| I-1404 | A | | | | 3020.4830 | 1512.4 | 1510.7 | |
| I-1405 | B | | | | 2484.1463 | 2487.6 | 2485.6 | |
| I-1406 | A | | | | 2660.2512 | 1332.5 | 1330.8 | |
| I-1407 | A | | | | 3012.4609 | 1508.8 | 1506.9 | |
| I-1408 | A | | | | 2739.3104 | 1371.7 | 1370.2 | |
| I-1409 | A | | | | 3091.5201 | 1547.9 | 1545.8 | |
| I-1410 | A | | | | 4016.0706 | 2010.5 | 2008.5 | |
| I-1411 | A | | | | 2555.1834 | 1280.0 | 1278.1 | |
| I-1412 | A | | | | 2731.2883 | 1368.1 | 1366.7 | |
| I-1413 | A | | | | 3083.4980 | 1544.3 | 1542.8 | |
| I-1414 | A | | | | 2066.8988 | 2070.0 | 2068.5 | |
| I-1415 | A | | | | 2052.8832 | 2056.0 | 2053.3 | |
| I-1416 | A | | | | 2038.8675 | 2041.9 | 2039.4 | |
| I-1417 | A | | | | 2038.8675 | 2041.9 | | |
| I-1418 | A | | | | 2038.8675 | 2042.0 | 2040.3 | |
| I-1419 | A | | | | 2050.8675 | 2054.0 | 2052.4 | |
| I-1420 | A | | | | 2036.8519 | 2039.9 | 2038.1 | |
| I-1421 | A | | | | 2050.8675 | 2054.0 | 2052.4 | |
| I-1422 | A | | | | 2036.8519 | 2054.0 | 2052.4 | |
| I-1423 | A | | | | 2050.8675 | 2054.0 | | |
| I-1424 | A | | | | 2036.8519 | 2040.0 | 2038.5 | |
| I-1425 | B | | | | 2172.8858 | 2175.6 | 2174.8 | |
| I-1426 | B | | | | 2185.9062 | 1094.8 | 1093.7 | |
| I-1427 | B | | | | 2109.8749 | 2112.4 | 2110.4 | |
| I-1428 | C | | | | 2123.8905 | 1063.8 | 2124.4 | |
| I-1429 | A | | | | 2121.8749 | 2123.3 | | |
| I-1430 | B | | | | 2123.8541 | 2126.7 | 2124.5 | |
| I-1431 | A | | | | 2069.9267 | 2072.3 | 2070.4 | |
| I-1432 | A | | | | 2055.9111 | 2058.3 | 2056.1 | |
| I-1433 | A | | | | 2083.9424 | 2086.3 | 2083.9 | |
| I-1434 | A | | | | 2111.9737 | 2114.3 | 2112.7 | |
| I-1435 | A | | | | 2083.9424 | 2086.3 | 2084.7 | |
| I-1436 | A | | | | 2111.9737 | 2114.4 | 2112.5 | |
| I-1437 | B | | | | 2102.9059 | 2105.3 | 2103.2 | |
| I-1438 | A | | | | 2132.9165 | 2135.4 | | |
| I-1439 | A | | | | 2132.9165 | 2135.4 | 2133.2 | |
| I-1440 | A | | | | 2139.9587 | 2142.4 | 2140.6 | |
| I-1441 | A | | | | 2139.9587 | 2142.4 | 2140.0 | |
| I-1442 | A | | | | 2139.9587 | 2142.3 | 2140.8 | |
| I-1443 | B | | | | 2111.9274 | 1058.3 | 2112.4 | |
| I-1444 | B | | | | 2151.9587 | 1263.3 | | |
| I-1445 | B | | | | 2151.9587 | 2154.2 | | |
| I-1446 | B | | | | 2151.9587 | 2154.4 | 2152.3 | |
| I-1447 | B | | | | 2151.9587 | 1078.8 | | |
| I-1448 | B | | | | 2137.9430 | 2140.2 | | |
| I-1449 | B | | | | 2144.9529 | 2147.4 | 2145.3 | |
| I-1450 | B | | | | 2116.9216 | 2119.4 | 2117.3 | |
| I-1451 | A | | | | 2144.8545 | 2147.3 | 2145.1 | |
| I-1452 | A | C | ++ | | 2126.9927 | 2125.9 | | A |
| I-1453 | A | | | | 2173.8698 | 2176.2 | 2174.4 | |
| I-1454 | A | | ++ | | 2172.8858 | 2175.2 | 2173.2 | |
| I-1455 | A | | | | 2172.8858 | 2176.1 | 2174.1 | |
| I-1456 | B | | +++ | | 2201.9011 | 2005.1 | 2002.6 | |
| I-1457 | B | | ++ | | 2123.8905 | 1064.3 | 2124.8 | |
| I-1458 | A | | ++ | | 2121.8749 | 2124.4 | 2122.9 | |
| I-1459 | B | | | | 2109.8749 | 2111.0 | 2111.0 | |
| I-1460 | A | | | | 2137.8698 | 2139.1 | 2139.1 | |
| I-1461 | A | | | | 2158.8701 | 2160.1 | 2160.1 | |
| I-1462 | B | | | | 2107.8592 | 2109.0 | 2109.0 | |
| I-1463 | A | D | ++ | | 2140.9356 | 2143.8 | 2141.5 | |
| I-1464 | A | | ++ | | 2124.9771 | 1064.6 | | |
| I-1465 | A | D | ++ | | 2082.9301 | 2085.8 | 2084.2 | |
| I-1466 | A | D | ++ | | 2110.9614 | 1057.6 | | |
| I-1467 | A | | ++ | | 2154.9512 | 2156.5 | | |
| I-1468 | A | | +++ | | 2096.9458 | 2099.8 | | |
| I-1469 | A | | | | 2186.9014 | | | |
| I-1470 | B | | | | 2186.9014 | | | |
| I-1471 | B | | | | 2123.8905 | | | |
| I-1472 | A | | | | 2263.0006 | 2263.8 | 2262.1 | |
| I-1473 | A | | | | 2305.0476 | 2305.9 | 2304.4 | |
| I-1474 | A | | | | 2402.1003 | 1201.6 | 1099.7 | |
| I-1475 | A | | | | 2293.0112 | 2293.9 | 2292.4 | |
| I-1476 | A | | | | 2390.0639 | 2391.2 | 2389.7 | |
| I-1477 | A | | | | 2289.0163 | 2289.9 | 2288.4 | |
| I-1478 | A | | | | 2261.0213 | 2261.9 | 2260.2 | |
| I-1479 | A | | | | 2303.0683 | 2303.9 | 2302.5 | |
| I-1480 | A | | | | 2400.1210 | 2401.1 | 2399.6 | |
| I-1481 | A | | | | 2291.0319 | 2291.8 | 2290.4 | |
| I-1482 | A | | | | 2388.0847 | 2389.2 | 2387.7 | |
| I-1483 | A | | | | 2287.0370 | 2287.9 | 2285.7 | |
| I-1484 | E | | | | 2032.8739 | 2033.6 | 2031.4 | |
| I-1485 | E | D | | | 2036.9052 | 2037.4 | 2035.7 | A |
| I-1486 | B | | | | 2060.9052 | 2062.7 | 2060.3 | |
| I-1487 | B | | | | 2060.9052 | 1031.9 | 1030.0 | |
| I-1488 | A | | | + | 2074.9209 | 2077.0 | 2074.9 | |
| I-1489 | A | | | | 2074.9209 | 2076.9 | 2074.9 | |
| I-1490 | B | | | | 2088.9365 | 2091.1 | 2088.6 | |
| I-1491 | A | | | | 2088.9365 | 2091.0 | 2088.7 | |
| I-1492 | B | | | | 2004.8426 | 2006.7 | 2004.4 | |
| I-1493 | E | | | | 2018.8583 | 1011.0 | 1009.0 | |
| I-1494 | A | | | | 2032.8739 | 2034.9 | 2032.9 | |
| I-1495 | A | | | | 2032.8739 | 1017.8 | 1015.9 | |
| I-1496 | A | | +++ | +++ | 2064.9365 | 2067.2 | 2065.6 | A |
| I-1497 | A | | +++ | +++ | 2078.9522 | 2081.1 | 2079.6 | A |
| I-1498 | C | | ++ | + | 2092.9678 | 2095.1 | 2092.5 | A |
| I-1499 | A | | +++ | | 2008.8739 | 2010.8 | 2008.8 | A |
| I-1500 | A | | +++ | | 2022.8896 | 2024.9 | 2023.0 | A |
| I-1501 | A | | | | 2036.9052 | 1019.9 | 1017.9 | A |
| I-1502 | A | | | | 2069.8540 | 2072.9 | 2070.7 | |
| I-1503 | A | | | | 2055.8384 | 2058.9 | 2057.2 | |
| I-1504 | A | | | | 2095.8697 | 1049.9 | 1048.0 | |
| I-1505 | A | | | + | 2055.8384 | 1030.4 | 1028.0 | |
| I-1506 | A | | | + | 2041.8227 | 1022.8 | 1020.7 | |
| I-1507 | A | | | | 2081.8540 | 2085.0 | 2083.3 | |
| I-1508 | A | | | + | 2009.8773 | 1006.6 | 1004.6 | |
| I-1509 | A | | | | 2009.8773 | 2012.0 | 2010.3 | |
| I-1510 | C | | | | 1995.8617 | 988.2 | 986.1 | |
| I-1511 | C | | | | 2035.8930 | 1008.6 | 1006.8 | |
| I-1512 | C | | | | 2009.8773 | 995.3 | 993.3 | |
| I-1513 | C | | | | 1995.8617 | 988.2 | 986.1 | |
| I-1514 | C | | | | 2035.8930 | 2038.6 | | |
| I-1515 | C | | | | 2049.9086 | 1015.0 | 1013.3 | |
| I-1516 | C | | | | 2035.8930 | 1008.3 | 1006.4 | |
| I-1517 | C | | | | 2035.8930 | 1008.3 | 1006.4 | |
| I-1518 | A | | | | 2021.8773 | 1012.7 | 2022.9 | |
| I-1519 | A | | | | 2159.8541 | 2162.0 | 2160.6 | |
| I-1520 | A | | | | 2160.8494 | 2163.2 | 2160.9 | |
| I-1521 | A | | | | 2111.8541 | 2113.2 | 2111.1 | |
| I-1522 | A | | | | 2097.8385 | 2099.7 | 2097.3 | |
| I-1523 | A | | | | 2114.9927 | 1061.4 | 2119.7 | A |
| I-1524 | B | | | | 2141.0084 | 1075.5 | 1073.5 | A |
| I-1525 | A | | | | 5122.6777 | 1025.7 | | |
| I-1526 | A | | | | 7764.2506 | 1554.1 | | |
| I-1527 | A | | | + | 2057.9040 | 2060.3 | 2057.8 | |
| I-1528 | A | | | + | 2043.8884 | 2046.3 | 2044.2 | |
| I-1529 | A | | | | 2083.9197 | 1043.6 | 1041.4 | |
| I-1530 | A | | | + | 2043.8884 | 2046.7 | 2044.2 | |
| I-1531 | A | | | + | 2029.8727 | 2032.6 | 2030.3 | |
| I-1532 | B | | | | 2085.9086 | 2088.8 | 2085.5 | |
| I-1533 | C | | | | 2085.9086 | 2088.9 | 2086.8 | |
| I-1534 | A | | | | 2071.8930 | 2074.8 | 2072.9 | |
| I-1535 | B | | | | 2071.8930 | 2074.9 | 2073.2 | |
| I-1536 | B | | | | 2073.9587 | 2075.6 | 2073.3 | |
| I-1537 | A | | | + | 2027.8679 | 2030.3 | 2029.1 | |
| I-1538 | A | | | | 2027.8679 | 2030.3 | 2029.5 | |
| I-1539 | A | | | + | 2013.8523 | 2016.1 | 2013.9 | |
| I-1540 | A | | | | 2013.8523 | 2016.2 | 2013.7 | |
| I-1541 | A | | | | 2015.9179 | 2017.3 | 2015.3 | |
| I-1542 | A | | | | 2015.9179 | 2017.4 | 2015.3 | |
| I-1543 | A | | | | 2001.9023 | 2003.4 | 2001.1 | |
| I-1544 | A | | | | 2001.9023 | 2003.4 | 2001.2 | |
| I-1545 | C | | | | 2011.9430 | 1006.8 | 1004.4 | |
| I-1546 | A | | | | 1997.9274 | 1999.4 | 1997.2 | |
| I-1547 | A | | | | 1997.9274 | 1999.5 | 1996.8 | |
| I-1548 | A | | | | 2019.8651 | 2022.2 | 2020.9 | A |
| I-1549 | B | | | +++ | 1963.8025 | 1967.2 | 1965.2 | A |
| I-1550 | A | | | +++ | 2005.8494 | 2008.6 | 2006.3 | A |
| I-1551 | A | | | +++ | 1991.8338 | 1994.3 | 1992.1 | A |
| I-1552 | A | | | ++ | 2005.8494 | 2008.7 | 2006.5 | A |
| I-1553 | A | | | +++ | 2039.8338 | 2042.6 | 2039.5 | A |
| I-1554 | A | | | | 2031.8651 | 2034.2 | 2032.6 | A |
| I-1555 | A | | | | 2045.8807 | 2048.0 | 2046.0 | A |
| I-1556 | A | | | | 2115.8651 | 2118.1 | 2116.6 | A |
| I-1557 | C | | | | 2018.8810 | 2021.2 | 2019.0 | A |
| I-1558 | D | | | | 1991.8701 | 1994.1 | 1991.5 | A |
| I-1559 | A | | | | 2001.8181 | 2007.2 | 2005.2 | A |
| I-1560 | A | | | + | 2023.8930 | 2026.4 | 2024.5 | |
| I-1561 | A | | | + | 2023.8930 | 1013.8 | 2024.4 | |
| I-1562 | A | | | + | 2037.9086 | 2040.4 | 2038.5 | |
| I-1563 | A | | | | 2037.9086 | 2041.7 | 2039.4 | |
| I-1564 | A | | | + | 2035.8930 | 2038.3 | 2036.9 | |
| I-1565 | A | | | + | 2035.8930 | 1019.8 | 1017.4 | |
| I-1566 | A | | | | 2049.9086 | 1026.8 | | |
| I-1567 | A | | | | 2049.9086 | 2053.1 | 2049.8 | |
| I-1568 | A | | | + | 2063.9243 | 2066.6 | 2064.7 | |
| I-1569 | A | | | + | 2063.9243 | 2066.6 | 2064.4 | |
| I-1570 | A | | | | 2079.9192 | 1041.8 | 1039.7 | |
| I-1571 | A | | | | 2079.9192 | 1041.8 | | |
| I-1572 | A | | | + | 2055.8651 | 2058.6 | 2056.0 | |
| I-1573 | A | | | + | 2055.8651 | 2058.5 | 2056.4 | |
| I-1574 | A | | | + | 2069.8807 | 2072.6 | 2070.5 | |
| I-1575 | A | | | + | 2069.8807 | 2072.5 | 2070.0 | |
| I-1576 | A | | | | 2069.8807 | 1065.7 | 1063.7 | |
| I-1577 | A | | | + | 2067.8651 | 2070.6 | 2068.7 | |
| I-1578 | A | | | + | 2067.8651 | 2070.5 | 2068.6 | |
| I-1579 | A | | | + | 2081.8807 | 1042.8 | 1040.6 | |
| I-1580 | A | | | + | 2095.8964 | 2098.6 | 2096.0 | |
| I-1581 | A | | | + | 2111.8913 | 2114.9 | 2112.8 | |
| I-1582 | A | | | | 2015.8338 | 1009.8 | 1007.9 | |
| I-1583 | A | | | | 2015.8338 | 1009.8 | 1007.8 | |
| I-1584 | A | | | | 2029.8494 | 2032.2 | 2030.4 | |
| I-1585 | A | | | | 2029.8494 | 2032.7 | 2030.3 | |
| I-1586 | A | | | | 2027.8338 | 2030.4 | 2027.9 | |
| I-1587 | A | | | | 2027.8338 | 2030.5 | 2028.1 | |
| I-1588 | A | | | | 2041.8494 | 2044.6 | 2042.3 | |
| I-1589 | A | | | | 2041.8494 | 1022.8 | 1020.7 | |
| I-1590 | A | | | | 2055.8651 | 2058.6 | 2056.4 | |
| I-1591 | A | | | | 2055.8651 | 1029.8 | 1027.9 | |
| I-1592 | A | | | | 2071.8600 | 1037.8 | 1035.3 | |
| I-1593 | A | | | | 2071.8600 | 2074.5 | 2072.1 | |
| I-1594 | A | | | | 1927.9396 | 1929.5 | 1927.3 | |
| I-1595 | A | | | | 1927.9396 | 1929.5 | 1927.4 | |
| I-1596 | B | | | | 1961.9007 | 1963.8 | 1961.6 | |
| I-1597 | B | | | | 1961.9007 | 1964.0 | 1961.8 | |
| I-1598 | A | | | + | 1961.9007 | 1963.8 | 1962.0 | |
| I-1599 | A | | | | 1961.9007 | 1963.9 | 1962.0 | |
| I-1600 | A | | | | 1961.9007 | 982.4 | 980.6 | |
| I-1601 | A | | | | 1941.9553 | 1943.4 | 1941.3 | |
| I-1602 | B | | | | 2005.8502 | 2008.4 | 2005.8 | |
| I-1603 | C | | | | 2005.8502 | 1004.7 | 2006.7 | |
| I-1604 | A | | | + | 2005.8502 | 2008.4 | 2006.0 | |
| I-1605 | A | | | | 2005.8502 | 1004.6 | 1002.8 | |
| I-1606 | A | | | | 2005.8502 | 1004.6 | 1002.6 | |
| I-1607 | A | | | | 2005.8502 | 1004.7 | 1002.8 | |
| I-1608 | A | | | | 1995.9270 | 1997.4 | 1995.3 | |
| I-1609 | A | | | | 1995.9270 | 1997.5 | 1995.2 | |
| I-1610 | A | | | | 1995.9270 | 1997.5 | 1995.2 | |
| I-1611 | A | | | | 1995.9270 | 1997.4 | 1995.3 | |
| I-1612 | A | | | | 2011.8066 | 1007.7 | 1005.7 | |
| I-1613 | A | | | | 2011.8066 | 1007.7 | 1005.9 | |
| I-1614 | A | | | | 2001.8834 | 2003.3 | 2001.3 | |
| I-1615 | A | | | | 2001.8834 | 2003.4 | 2001.1 | |
| I-1616 | A | | | | 2112.9771 | 2115.4 | 2113.6 | A |
| I-1617 | A | | | | 2138.9927 | 1071.2 | 1069.3 | A |
| I-1618 | B | | | | 2141.0084 | 1072.2 | 1070.1 | A |
| I-1619 | A | | | | 2170.9825 | 1087.2 | 1085.7 | A |
| I-1620 | A | | | | 2098.9614 | 2101.0 | 2099.3 | A |
| I-1621 | A | | | | 2124.9771 | 1064.1 | 1061.9 | A |
| I-1622 | A | | | | 2126.9927 | 2129.2 | 2127.4 | A |
| I-1623 | A | | | | 2156.9669 | 2160.0 | 2157.9 | A |
| I-1624 | A | | | | 2126.9927 | 1065.0 | 1063.0 | A |
| I-1625 | A | | | | 2112.9771 | 2115.5 | 2113.3 | A |
| I-1626 | A | | | | 2098.9614 | 1051.2 | 1049.3 | A |
| I-1627 | A | | | | 2084.9458 | 2087.4 | 2085.5 | A |
| I-1628 | A | | | | 2194.0097 | 2195.6 | 2193.5 | |
| I-1629 | A | | | | 2194.0097 | 2195.6 | 2193.4 | |
| I-1630 | A | | | | 2136.8654 | 2139.4 | 2137.3 | |
| I-1631 | B | | | | 2123.8701 | 1063.8 | 1062.0 | |
| I-1632 | A | | | | 2136.8654 | 1070.2 | | |
| I-1633 | B | | | | 2123.8701 | 1063.8 | 1061.7 | |
| I-1634 | A | | | | 2139.8651 | 1071.7 | 1069.7 | |
| I-1635 | E | | | | 2127.8287 | 1814.1 | 1811.7 | |
| I-1636 | A | | | | 2138.8810 | 2141.5 | 2138.8 | |
| I-1637 | B | | | | 2125.8858 | 2128.7 | 2126.2 | |
| I-1638 | A | | | + | 2138.8810 | 2041.9 | 2039.3 | |
| I-1639 | B | | | + | 2125.8858 | 1064.8 | | |
| I-1640 | E | | | | 2199.8804 | 1085.8 | 1084.0 | |
| I-1641 | A | | | | 2170.9881 | 2173.0 | 2171.0 | |
| I-1642 | A | | | | 2170.9881 | 2172.9 | 2171.4 | |
| I-1643 | A | | | | 2128.9412 | 2130.9 | 2128.7 | |
| I-1644 | A | | | | 2128.9412 | 1065.9 | 1064.0 | |
| I-1645 | A | | | | 2137.0271 | 2138.5 | 2136.5 | |
| I-1646 | A | | | | 2137.0271 | 2138.5 | 2136.4 | |
| I-1647 | A | | | | 2094.9801 | 2096.4 | 2094.4 | |
| I-1648 | A | | | | 2023.9430 | 2025.3 | 2023.4 | |
| I-1649 | A | | | | 2023.9430 | 2025.4 | 2023.3 | |
| I-1650 | A | | | | 2155.0177 | 2156.6 | 2154.4 | |
| I-1651 | A | | | | 2155.0177 | 2156.5 | 2154.1 | |
| I-1652 | A | | | | 2112.9707 | 2114.4 | 2112.6 | |
| I-1653 | A | | | | 2041.9336 | 2043.3 | 2041.4 | |
| I-1654 | B | | | + | 2205.0145 | 2206.4 | 2204.3 | |
| I-1655 | B | | | + | 2205.0145 | 2206.5 | 2204.2 | |
| I-1656 | A | | | + | 2162.9675 | 2164.6 | 2162.3 | |
| I-1657 | A | | | + | 2162.9675 | 2164.5 | 2162.1 | |
| I-1658 | A | | | + | 2091.9304 | 2093.3 | 2091.3 | |
| I-1659 | A | | | + | 2091.9304 | 2093.4 | 2091.2 | |
| I-1660 | A | | | | 2202.0172 | 2203.4 | 2201.3 | |
| I-1661 | C | | | | 2202.0172 | 1102.3 | 1100.3 | |
| I-1662 | B | | | | 2188.0016 | 2189.4 | 2187.3 | |
| I-1663 | D | | | | 2188.0016 | 1095.3 | 1093.4 | |
| I-1664 | A | | | | 2264.0329 | 2265.5 | 2263.3 | |
| I-1665 | B | | | | 2264.0329 | 2265.5 | 2263.7 | |
| I-1666 | A | | | | 2224.0703 | 2225.6 | 2223.5 | |
| I-1667 | B | | | | 2242.0234 | 2243.5 | 2241.4 | |
| I-1668 | A | | | | 2242.0234 | 1122.2 | 1120.4 | |
| I-1669 | A | | | | 2242.0234 | 2243.5 | 2241.6 | |
| I-1670 | A | | | | 2203.0125 | 2204.5 | 2202.4 | |
| I-1671 | C | | | | 2203.0125 | 2204.5 | 2202.4 | |
| I-1672 | A | | | | 2229.0281 | 2230.5 | 2228.5 | |
| I-1673 | A | | | | 2130.9512 | 1067.1 | 1065.0 | A |
| I-1674 | C | | | | 2129.9672 | 2132.4 | 2130.0 | A |
| I-1675 | C | | | | 2102.9563 | 1053.0 | 1051.2 | A |
| I-1676 | C | | | | 2144.9669 | 1074.2 | 1072.3 | A |
| I-1677 | C | | | | 2143.9829 | 1073.6 | 1071.7 | A |
| I-1678 | C | | | | 2116.9720 | 1060.1 | 1058.1 | A |
| I-1679 | B | | | | 2158.9825 | 1081.1 | 1079.3 | A |
| I-1680 | A | | | | 2126.9 | 2128.2 | 2125.8 | |
| I-1681 | A | | | | 2099.9 | 2101.3 | 2098.9 | |
| I-1682 | C | | | | 2113.9 | 2115.1 | 2113.0 | |
| I-1683 | C | | | | 2099.9 | 2101.2 | 2099.0 | |
| I-1684 | C | | | | 2113.9 | 2115.2 | 2113.3 | |
| I-1685 | C | | | | 2113.9 | 2115.1 | 2113.8 | |
| I-1686 | B | | | | 2113.9 | 2115.2 | 2113.1 | |
| I-1687 | C | | | | 2119.9 | 2121.2 | 2119.3 | |
| I-1688 | A | | | | 2211.0 | 1107.1 | 1105.3 | A |
| I-1689 | A | | | + | 2197.0 | 2199.0 | 2197.3 | A |
| I-1690 | A | | | + | 2225.0 | 2228.3 | 2226.0 | A |
| I-1691 | A | | | | 2211.0 | 2212.9 | 2210.3 | A |
| I-1692 | A | | | + | 2183.0 | 2185.2 | 2183.6 | A |
| I-1693 | A | | | + | 2168.9 | 2170.6 | 2169.0 | A |
| I-1694 | A | | | | 2195.0 | 1099.0 | 1097.2 | A |
| I-1695 | A | | | + | 2223.0 | 2224.9 | 2222.8 | A |
| I-1696 | A | | | | 2209.0 | 2210.7 | 2208.7 | |
| I-1697 | A | | | | 1985.9 | 1987.7 | | A |
| I-1698 | A | | | | 1971.9 | 1973.8 | 1971.6 | A |
| I-1699 | A | | | | 1985.9 | 1987.8 | 1985.5 | A |
| I-1700 | A | | | | 1971.9 | 1973.7 | 1971.5 | A |
| I-1701 | A | | | + | 2620.1 | 1311.9 | 1309.9 | |
| I-1702 | A | | | + | 3896.9 | 1950.3 | 1948.7 | |
| I-1703 | A | C | | + | 2762.2 | 1382.8 | 1381.0 | |
| I-1704 | A | D | | + | 4039.0 | 2021.3 | 2019.2 | |
| I-1705 | A | C | | + | 2833.2 | 1418.4 | 1416.2 | |
| I-1706 | A | D | | + | 4110.0 | 2056.9 | 2054.8 | |
| I-1707 | A | | | + | 2751.3 | 1377.5 | 1375.3 | |
| I-1708 | A | D | | + | 4028.0 | 2016.0 | 2014.2 | |
| I-1709 | A | | ++ | | 2004.9 | 2006.2 | 2004.0 | |
| I-1710 | A | | | + | 2165.9 | 1084.4 | 1082.3 | |
| I-1711 | A | | | | 2179.9 | 2181.6 | 2179.9 | |
| I-1712 | A | C | | + | 2163.9 | 2165.4 | 2162.6 | |
| I-1713 | A | C | | + | 2177.9 | 2180.7 | 2178.1 | |
| I-1714 | A | C | | + | 2191.9 | 2193.6 | 2191.6 | |
| I-1715 | A | | | | 2213.9 | 2215.6 | 2212.8 | |
| I-1716 | A | | | | 2191.8 | 2193.5 | | |
| I-1717 | A | B | | + | 2264.9 | 2266.5 | 2264.6 | |
| I-1718 | A | | | | 2204.9 | 2205.6 | 2203.5 | |
| I-1719 | A | | | | 2215.9 | 2216.9 | 2214.6 | |
| I-1720 | A | | | | 2240.9 | 2141.8 | 2140.2 | |
| I-1721 | A | | | | 2242.9 | 2244.6 | 2243.1 | |
| I-1722 | A | | | | 2201.9 | 2204.3 | | |
| I-1723 | A | C | | + | 2164.9 | 2266.5 | 2263.7 | |
| I-1724 | A | | | +++ | 2178.9 | 2180.6 | 2179.2 | |
| I-1725 | A | C | | +++ | 2162.9 | 2164.6 | | |
| I-1726 | A | | | +++ | 2176.9 | 2179.5 | 2177.7 | |
| I-1727 | A | | | +++ | 2190.9 | 2193.8 | 2191.1 | |
| I-1728 | B | | | | 2212.9 | 2215.6 | 2213.5 | |
| I-1729 | A | | | | 2190.8 | 2193.4 | 2191.6 | |
| I-1730 | A | | | +++ | 2263.9 | 2265.5 | 2264.5 | |
| I-1731 | A | | | | 2203.9 | 2205.7 | | |
| I-1732 | A | | | +++ | 2239.9 | 2241.5 | 2239.2 | |
| I-1733 | A | | | +++ | 2241.9 | 2243.7 | 2241.7 | |
| I-1734 | A | | | | 2200.9 | 2203.6 | 2201.6 | |
| I-1735 | C | | | | 2084.0 | 2086.1 | 2084.4 | |
| I-1736 | A | | | + | 2084.0 | 2086.2 | 2084.7 | |
| I-1737 | A | | | | 2193.0 | 2195.1 | 2193.8 | |
| I-1738 | A | | | | 2207.0 | 2209.1 | 2207.8 | |
| I-1739 | A | | | | 2253.0 | 2255.1 | 2253.6 | |
| I-1740 | A | | | + | 2203.0 | 2205.4 | 2203.5 | |
| I-1741 | A | | | | 2217.0 | 2217.8 | 2215.8 | |
| I-1742 | A | | | ++ | 2217.0 | 2219.1 | 2217.7 | |
| I-1743 | A | | | ++ | 2217.0 | 2219.2 | 2217.8 | |
| I-1744 | C | | | | 2170.0 | 2172.1 | 2170.4 | |
| I-1745 | B | | | | 2232.0 | 1117.7 | 1116.2 | |
| I-1746 | D | | | | 2198.0 | 1100.6 | 1198.9 | |
| I-1747 | A | | | | 2169.0 | 2171.2 | 2169.6 | |
| I-1748 | C | | | | 2169.0 | 2171.1 | 2169.1 | |
| I-1749 | A | | | | 2183.0 | 2182.8 | 2180.9 | |
| I-1750 | B | | | | 2197.1 | 1100.0 | 1098.5 | |
| I-1751 | A | | | | 2242.0 | 1122.9 | 1120.9 | |
| I-1752 | A | C | | + | 2229.0 | 1116.3 | 1114.4 | |
| I-1753 | A | | | +++ | 2211.0 | 2213.1 | 2212.0 | |
| I-1754 | A | | | +++ | 2189.0 | 2191.2 | | |
| I-1755 | A | | | +++ | 2190.0 | 2192.2 | 2190.6 | |
| I-1756 | A | | | | 2190.0 | 1096.4 | 1094.6 | |
| I-1757 | A | | | | 1995.9 | | | |
| I-1758 | A | | | | 2009.9 | | | |
| I-1759 | B | | | | 2066.9 | | | |
| I-1760 | A | | | | 2009.9 | | | |
| I-1761 | A | | | | 2023.9 | | | |
| I-1762 | A | | | | 2080.9 | | | |
| I-1763 | B | | | | 2207.0 | 1104.9 | 1103.4 | |
| I-1764 | A | | | | 2207.0 | 2209.2 | 2207.7 | |
| I-1765 | A | | | | 2207.0 | 1105.1 | 1103.9 | |
| I-1766 | A | D | | +++ | 2187.9 | | | |
| I-1767 | A | | | | 2296.9 | | | |
| I-1768 | A | | | | 2285.0 | | | |
| I-1769 | B | D | | + | 2313.0 | | | |
| I-1770 | B | D | | + | 2301.0 | | | |
| I-1771 | A | | | | 2286.9 | | | |
| I-1772 | A | D | | + | 2275.0 | | | |
| I-1773 | A | D | | + | 2298.9 | | | |
| I-1774 | A | C | | + | 2287.0 | | | |
| I-1775 | A | | | | 2287.0 | | | |
| I-1776 | A | | | | 2346.9 | | | |
| I-1777 | B | D | | + | 2335.0 | | | |
| I-1778 | A | | | | 2066.9 | | | |
| I-1779 | A | | | | 1981.8 | | | |
| I-1780 | A | | | | 1981.8 | 992.3 | 990.3 | |
| I-1781 | A | | | | 1995.9 | | | |
| I-1782 | A | | | | 2052.9 | | | |
| I-1783 | A | | | | 2211.0 | 2212.7 | 2210.0 | |
| I-1784 | A | C | | | 2227.0 | 2229.1 | 2227.0 | |
| I-1785 | A | | | | 2211.0 | 2212.7 | 2210.6 | |
| I-1786 | A | C | | | 2031.9 | 2033.8 | 2031.7 | |
| I-1787 | A | | ++ | + | 2569.1 | 1286.3 | 1284.3 | |
| I-1788 | A | | ++ | + | 2833.2 | 1418.3 | 1416.3 | |
| I-1789 | A | | ++ | + | 2653.2 | 1328.3 | 1326.3 | |
| I-1790 | A | | ++ | + | 2917.3 | 1460.4 | 1458.3 | |
| I-1791 | E | | + | + | 2793.3 | 1398.4 | | |
| I-1792 | E | | + | + | 3057.5 | 1530.5 | | |
| I-1793 | B | | | | 2080.9 | 2082.9 | 2080.6 | |
| I-1794 | C | | | | 2038.9 | 2040.8 | 2039.0 | |
| I-1795 | C | | | | 2066.9 | 2068.3 | 2065.7 | |
| I-1796 | A | | | | 2094.9 | 2097.0 | 2095.5 | |
| I-1797 | A | D | | | 2052.9 | 2054.8 | | |
| I-1798 | A | C | | | 2080.9 | 1042.0 | | |
| I-1799 | B | | | | 2094.9 | 2096.2 | 2094.5 | |
| I-1800 | C | | | | 2052.9 | 2055.9 | 2053.6 | |
| I-1801 | E | | | | 2080.9 | 2083.7 | 2082.1 | |
| I-1802 | B | | | | 2094.9 | 2096.8 | | |
| I-1803 | C | | | | 2052.9 | 2055.0 | 2053.4 | |
| I-1804 | C | | | | 2080.9 | 2082.9 | 2080.9 | |
| I-1805 | A | C | | | 2324.0 | 1163.5 | 1161.3 | |
| I-1806 | A | C | | | 2289.0 | 1146.0 | 1144.1 | |
| I-1807 | A | D | | | 2199.0 | 2200.8 | 2198.7 | |
| I-1808 | A | D | | | 2245.0 | 1124.0 | 1121.6 | |
| I-1809 | A | B | | | 2097.0 | 2098.0 | 2095.8 | |
| I-1810 | A | C | | | 2097.0 | 2098.0 | 2095.9 | |
| I-1811 | B | | | | 2092.9 | 2095.1 | 2093.0 | |
| I-1812 | A | D | | | 2125.0 | 2126.1 | 2124.0 | |
| I-1813 | A | C | | | 2125.0 | 2126.1 | 2124.0 | |
| I-1814 | A | D | | | 2125.0 | 2126.1 | 2123.8 | |
| I-1815 | A | | ++ | | 2698.3 | 1350.2 | 1348.2 | |
| I-1816 | A | | ++ | | 2698.3 | 1350.2 | 1348.2 | |
| I-1817 | A | C | ++ | | 2754.3 | 1378.2 | 1376.2 | |
| I-1818 | A | | | | 2726.3 | 1364.3 | 1362.4 | |
| I-1819 | A | | | | 2726.3 | 1364.3 | 1362.2 | |
| I-1820 | A | B | ++ | | 2726.3 | 1364.2 | 1362.2 | |
| I-1821 | A | | ++ | | 2726.3 | 1364.2 | 1362.3 | |
| I-1822 | A | | ++ | | 2698.3 | 1350.2 | 1348.3 | |
| I-1823 | B | | ++ | | 2698.3 | 1350.6 | 1348.5 | |
| I-1824 | A | | | | 2108.9 | 2110.9 | 2109.2 | |
| I-1825 | A | | | | 2066.9 | 2068.8 | 2066.1 | |
| I-1826 | A | | | | 2094.9 | 2096.8 | 2095.1 | |
| I-1827 | A | | | | 2108.9 | 2110.9 | 2109.5 | |
| I-1828 | A | | | | 2066.9 | 2069.7 | 2066.8 | |
| I-1829 | A | | | | 2094.9 | 2096.9 | 2095.0 | |
| I-1830 | A | | | | 2108.9 | 2110.9 | 2107.7 | |
| I-1831 | A | | | | 2066.9 | 2068.8 | 2066.6 | |
| I-1832 | A | | | | 2094.9 | 2096.8 | 2094.9 | |
| I-1833 | A | | | | 2123.0 | 2124.9 | | |
| I-1834 | A | | | | 2080.9 | 2082.8 | 2070.7 | |
| I-1835 | A | | | | 2108.9 | 2110.9 | 2109.3 | |
| I-1836 | A | | | | 2135.0 | 1069.0 | 2135.0 | |
| I-1837 | B | | | | 2120.9 | 2123.2 | 2121.5 | |
| I-1838 | A | | | | 2135.0 | 1069.0 | 1066.8 | |
| I-1839 | A | | | | 2092.9 | 1048.0 | 1046.1 | |
| I-1840 | B | | | | 2120.9 | 1062.0 | 1060.1 | |
| I-1841 | A | | | | 2079.9 | 2081.0 | 2079.0 | |
| I-1842 | A | | | | 2079.9 | 2081.4 | 2079.2 | |
| I-1843 | A | | | | 2177.0 | 2178.1 | 2175.5 | |
| I-1844 | A | | | | 2177.0 | 2178.3 | 2176.0 | |
| I-1845 | A | | | | 2177.0 | 2178.0 | 2175.9 | |
| I-1846 | A | | | | 2166.9 | 2168.2 | 2165.7 | |
| I-1847 | A | | | | 2179.0 | 2180.1 | 2177.9 | |
| I-1848 | A | | | | 2179.0 | 2180.2 | 2177.8 | |
| I-1849 | A | | | | 2179.0 | 2180.1 | 2178.1 | |
| I-1850 | A | | | | 2122.0 | 2123.1 | 2120.9 | |
| I-1851 | A | | | | 2122.0 | 2123.1 | 2120.9 | |
| I-1852 | A | | | | 2107.9 | 2109.0 | 2106.9 | |
| I-1853 | A | | | | 2109.9 | 2111.0 | 2108.9 | |
| I-1854 | A | | | | 2219.0 | 2220.1 | 2218.7 | |
| I-1855 | A | | | + | 2205.0 | 2206.1 | 2203.6 | |
| I-1856 | A | | | | 2207.0 | 2208.1 | 2205.8 | |
| I-1857 | A | C | | ++ | 2005.9 | 2007.7 | 2006.2 | |
| I-1858 | A | C | | + | 2035.9 | 2037.6 | 2035.8 | |
| I-1859 | A | C | | + | 2035.9 | 2037.7 | 2036.4 | |
| I-1860 | A | C | | + | 2021.9 | 2023.8 | 2021.3 | |
| I-1861 | A | | | + | 2021.9 | 2023.6 | 2021.7 | |
| I-1862 | A | C | | + | 2021.9 | 2023.7 | 2021.9 | |
| I-1863 | A | | | + | 1991.8 | 1993.7 | 1991.9 | |
| I-1864 | A | | | +++ | 1991.8 | 1993.8 | 1992.3 | |
| I-1865 | A | | | + | 2021.9 | 2023.8 | 2021.9 | |
| I-1866 | A | | | ++ | 2021.9 | 2023.7 | 2022.3 | |
| I-1867 | A | | | | 2007.8 | 2009.6 | 2007.8 | |
| I-1868 | A | | | | 2007.8 | 2009.7 | | |
| I-1869 | A | | | + | 2007.8 | 2009.7 | 2007.9 | |
| I-1870 | A | | | + | 2007.8 | 2009.7 | 2008.2 | |
| I-1871 | A | | | | 2206.9 | | | A |
| I-1872 | A | | | | 2221.0 | 2222.1 | 2220.1 | A |
| I-1873 | A | D | | | 2262.0 | 2263.2 | 2261.4 | A |
| I-1874 | A | | | | 2205.0 | 2206.1 | 2204.1 | A |
| I-1875 | A | | | | 2283.0 | 2284.0 | 2282.1 | A |
| I-1876 | A | | | | 2163.0 | 2164.2 | 2162.6 | A |
| I-1877 | A | | | + | 2082.9 | 2084.1 | 2082.3 | A |
| I-1878 | A | | | + | 2096.9 | 2098.1 | 2096.2 | A |
| I-1879 | A | D | | +++ | 2138.0 | 2139.2 | 2136.9 | A |
| I-1880 | A | D | | + | 2081.0 | 2082.2 | 2080.4 | A |
| I-1881 | A | D | | + | 2158.9 | 1080.7 | 1078.8 | A |
| I-1882 | A | | | + | 2038.9 | 2040.0 | 2038.1 | A |
| I-1883 | A | | | | 2152.0 | 2157.8 | 2156.6 | |
| I-1884 | A | | | | 2152.0 | 2157.8 | 2156.0 | |
| I-1885 | A | | | | 2324.0 | | | A |
| I-1886 | A | | | | 2200.0 | 2202.3 | 2200.3 | A |
| I-1887 | A | | | | 2214.0 | 2216.0 | 2214.2 | A |
| I-1888 | A | | | | 2266.0 | 2068.0 | 2065.8 | A |
| I-1889 | A | | | | 2142.0 | 2144.1 | 2142.1 | A |
| I-1890 | A | | | | 2294.0 | | | A |
| I-1891 | A | | | | 2170.0 | 2171.9 | 2170.1 | A |
| I-1892 | A | | | | 2184.0 | 1093.5 | 1091.6 | A |
| I-1893 | A | | | | 2308.0 | 2310.0 | 2308.0 | A |
| I-1894 | A | | | | 2184.0 | 2186.0 | 2183.8 | A |
| I-1895 | A | | | | 2198.0 | 1100.5 | 1098.5 | A |
| I-1896 | A | | | | 2135.0 | 2136.9 | 2134.6 | |
| I-1897 | A | | | | 2092.9 | 2095.7 | 2093.8 | |
| I-1898 | A | | | | 2135.0 | 2138.2 | | |
| I-1899 | A | | | | 2092.9 | 2094.8 | | |
| I-1900 | B | | | | 2104.9 | 2106.8 | 2104.4 | |
| I-1901 | B | | | | 2147.0 | 2149.9 | | |
| I-1902 | B | | | | 2104.9 | 2107.1 | 2105.4 | |
| I-1903 | A | | | | 2147.0 | 2148.9 | 2147.1 | |
| I-1904 | A | | | | 2104.9 | 2107.2 | | |
| I-1905 | A | | | | 2147.0 | 2149.1 | 2147.3 | |
| I-1906 | A | | | | 2104.9 | 2107.8 | | |
| I-1907 | A | | | | 2066.9 | 2069.0 | 2067.4 | |
| I-1908 | A | | | | 2105.9 | 2108.2 | | |
| I-1909 | A | | | | 2122.9 | 2125.2 | 2123.1 | |
| I-1910 | A | | | | 2139.9 | 1071.9 | 1069.6 | |
| I-1911 | C | | | | 2139.9 | 1071.8 | 1070;1 | |
| I-1912 | A | | | | 2054.9 | 2056.3 | 2054.1 | |
| I-1913 | B | | | | 2094.0 | 2095.4 | 2093.3 | |
| I-1914 | A | | | | 2110.9 | 2112.4 | | |
| I-1915 | D | | | | 2127.9 | 2129.5 | 2126.9 | |
| I-1916 | B | | | | 2127.9 | 2129.8 | 2127.9 | |
| I-1917 | A | | | | 2689.2 | | | |
| I-1918 | A | | | | 2953.3 | | | |
| I-1919 | B | | | | 2885.4 | | | |
| I-1920 | B | | | | 3149.5 | | | |
| I-1921 | A | | | | 2175.0 | 2177;2 | | |
| I-1922 | A | | | | 2132.9 | 2136.1 | | |
| I-1923 | A | | | | 2092.9 | 2095.1 | 2093.1 | |
| I-1924 | A | | | | 2135.0 | 2136.9 | 2135.3 | |
| I-1925 | A | | | | 2120.9 | 1062.1 | 1060.1 | |
| I-1926 | A | | | | 2092.9 | 1048.1 | 1046.4 | |
| I-1927 | A | | | | 2241.0 | | | A |
| I-1928 | A | | | | 2229.0 | | | A |
| I-1929 | A | | | | 2235.0 | | | A |
| I-1930 | A | | | | 2269.0 | | | A |
| I-1931 | A | | | | 2257.0 | | | A |
| I-1932 | A | | | | 2263.0 | | | A |
| I-1933 | A | | | | 2340.0 | | | A |
| I-1934 | A | | | | 2346.0 | | | A |
| I-1935 | A | | | | 2109.0 | | | A |
| I-1936 | A | | | | 2149.0 | | | A |
| I-1937 | A | | | | 2123.0 | | | A |
| I-1938 | A | | | | 2095.0 | | | A |
| I-1939 | A | | | | 2219.0 | | | A |
| I-1940 | A | | | | 2192.0 | | | A |
| I-1941 | A | | | | 2232.1 | | | A |

| 1 | Description |
|---|---|
| I-608 | Ac-PL3-Asp-Leu-B5-Asp-Asp-dLys*3-Ala-Phe-GlnR*3-PyrS2-3Thi-BztA-Gln-NH2 |
| I-609 | Ac-PL3-Asp-Leu-B5-Asp-Asp-DGlnR*3-Ala-Phe-Lys*3-PyrS2-3Thi-BztA-Gln-NH2 |
| I-700 | Ac-PL3-Asp-Leu-B5-Asp-Asp-DGlnR*3-Ala-Phe-Lys*3-PyrS2-3Thi-BztA-Gln-NH2 |
| I-701 | Ac-PL3-Asp-Npg-B5-Asp-3COOHF-[ethylenediamine]GlnR-Ala-Phe-Leu-PyrS2-2F3MeF-BztA- |
| | GlnR-NH2 |
| I-702 | Ac-PL3-Asp-Npg-B5-Asp-3COOHF-[Me2ethylenediamine]GlnR-Ala-Phe-Leu-PyrS2-2F3MeF- |
| | BztA-GlnR-NH2 |
| I-703 | Ac-PL3-Asp-Npg-B5-Asp-3COOHF-[diaminopropane]GlnR-Ala-Phe-Leu-PyrS2-2F3MeF-BztA- |
| | GlnR-NH2 |
| I-704 | Ac-PL3-Asp-Npg-B5-Asp-3COOHF-[diaminopentane]GlnR-Ala-Phe-Leu-PyrS2-2F3MeF-BztA- |
| | GlnR-NH2 |
| I-705 | Ac-PL3-Asp-Npg-B5-Asp-3COOHF-[Me2diaminohexane]GlnR-Ala-Phe-Leu-PyrS2-2F3MeF- |
| | BztA-GlnR-NH2 |
| I-706 | Ac-PL3-Asp-Ile-B5-Asp-3COOHF-Aib-Ala-Phe-Lys*3-PyrS2-3Thi-BztA-GlnR*3-Ala-NH2 |
| I-707 | Ac-PL3-Asp-Chg-B5-Asp-3COOHF-Aib-Ala-Phe-Lys*3-PyrS2-3Thi-BztA-GlnR*3-Ala-NH2 |
| I-708 | Ac-PL3-Asp-DipA-B5-Asp-3COOHF-Aib-Ala-Phe-Lys*3-PyrS2-3Thi-BztA-GlnR*3-Ala-NH2 |
| I-709 | Ac-PL3-Asp-Npg-B5-Asp-3COOHF-Aib-Ala-Phe-TriAzLys*3-PyrS2-3Thi-BztA-sAla*3-Ala-NH2 |
| I-710 | Ac-PL3-Asp-Npg-B5-Asp-3COOHF-Aib-Ala-Phe-1MeK*3-PyrS2-3Thi-BztA-hGlnR*3-Ala-NH2 |
| I-711 | Ac-PL3-Asp-Npg-B5-Asp-3COOHF-Aib-Ala-Phe-1MeK*3-PyrS2-3Thi-BztA-GlnR*3-Ala-NH2 |
| I-712 | Ac-PL3-Asp-Npg-B5-Asp-3COOHF-Aib-Ala-Phe-Lys*3-PyrS2-3Thi-BztA-GlnR*3-NH2 |
| I-713 | Ac-PL3-Asp-Npg-B5-Asp-3COOHF-Aib-Ala-Phe-Lys*3-PyrS2-3Thi-BztA-GlnR*3-NH2 |
| I-714 | Ac-PL3-Asp-Npg-B5-Asp-3COOHF-Aib-Ala-Phe-Lys*3-PyrS2-3Thi-BztA-GlnR*3-Gly-NH2 |
| I-715 | Ac-PL3-Asp-Npg-B5-Asp-3COOHF-Aib-Ala-Phe-Lys*3-PyrS2-3Thi-BztA-GlnR*3-Leu-NH2 |
| I-716 | Ac-PL3-Asp-Npg-B5-Asp-3COOHF-Aib-Ala-Phe-Lys*3-PyrS2-3Thi-BztA-GlnR*3-Leu-NH2 |
| I-717 | Ac-PL3-Asp-Npg-B5-Asp-3COOHF-Aib-Ala-Phe-Lys*3-PyrS2-3Thi-BztA-GlnR*3-Npg-NH2 |
| I-718 | Ac-PL3-Asp-Npg-B5-Asp-3COOHF-Aib-Ala-Phe-Lys*3-PyrS2-3Thi-BztA-GlnR*3-Npg-NH2 |
| I-719 | Ac-PL3-Asp-Npg-B5-Asp-3COOHF-Aib-Ala-Phe-Lys*3-PyrS2-3Thi-BztA-GlnR*3-Pro-NH2 |
| I-720 | Ac-PL3-Asp-Npg-B5-Asp-3COOHF-Aib-Ala-Phe-Lys*3-PyrS2-3Thi-BztA-GlnR*3-dPro-NH2 |
| I-721 | Ac-PL3-Asp-Npg-B5-Asp-3COOHF-Aib-Ala-Phe-Lys*3-PyrS2-3Thi-BztA-GlnR*3-Ser-NH2 |
| I-722 | Ac-PL3-Asp-Npg-B5-Asp-3COOHF-Aib-Ala-Phe-Lys*3-PyrS2-3Thi-BztA-GlnR*3-Phe-NH2 |
| I-723 | Ac-PL3-Asp-Npg-B5-Asp-3COOHF-Aib-Ala-Phe-Lys*3-PyrS2-3Thi-BztA-GlnR*3-Asn-NH2 |
| I-724 | Ac-PL3-Asp-Npg-B5-Asp-3COOHF-Aib-Ala-Phe-Lys*3-PyrS2-3Thi-BztA-GlnR*3-Gln-NH2 |
| I-725 | Ac-PL3-Asp-Npg-B5-Asp-3COOHF-Aib-Ala-Phe-Lys*3-PyrS2-3Thi-BztA-GlnR*3-Trp-NH2 |
| I-726 | Ac-PL3-Asp-Npg-B5-Asp-3COOHF-Aib-Ala-Phe-Lys*3-PyrS2-3Thi-BztA-GlnR*3-Trp-NH2 |
| I-727 | Ac-PL3-Asp-Npg-B5-Asp-3COOHF-Aib-Ala-Phe-Lys*3-PyrS2-3Thi-BztA-GlnR*3-Tyr-NH2 |
| I-728 | Ac-PL3-Asp-Npg-B5-Asp-3COOHF-Aib-Ala-Phe-Lys*3-PyrS2-3Thi-BztA-GlnR*3-Tyr-NH2 |
| I-729 | Ac-PL3-Asp-Ile-B5-Asp-3COOHF-Phe-Ala-Phe-Lys*3-PyrS2-3Thi-BztA-GlnR*3-Ala-NH2 |
| I-730 | Ac-PL3-Asp-Ile-B5-Asp-3COOHF-CyLeu-Ala-Phe-Lys*3-PyrS2-3Thi-BztA-GlnR*3-Ala-NH2 |
| I-731 | Ac-PL3-Asp-Ile-B5-Asp-3COOHF-Cha-Ala-Phe-Lys*3-PyrS2-3Thi-BztA-GlnR*3-Ala-NH2 |
| I-732 | Ac-PL3-Asp-Cba-B5-Asp-3COOHF-Phe-Ala-Phe-Lys*3-PyrS2-3Thi-BztA-GlnR*3-Ala-NH2 |
| I-733 | Ac-PL3-Asp-Cba-B5-Asp-3COOHF-CyLeu-Ala-Phe-Lys*3-PyrS2-3Thi-BztA-GlnR*3-Ala-NH2 |
| I-734 | Ac-PL3-Asp-Cba-B5-Asp-3COOHF-Cha-Ala-Phe-Lys*3-PyrS2-3Thi-BztA-GlnR*3-Ala-NH2 |
| I-735 | Ac-PL3-Asp-Chg-B5-Asp-3COOHF-Phe-Ala-Phe-Lys*3-PyrS2-3Thi-BztA-GlnR*3-Ala-NH2 |
| I-736 | Ac-PL3-Asp-Chg-B5-Asp-3COOHF-CyLeu-Ala-Phe-Lys*3-PyrS2-3Thi-BztA-GlnR*3-Ala-NH2 |
| I-737 | Ac-PL3-Asp-Chg-B5-Asp-3COOHF-Cha-Ala-Phe-Lys*3-PyrS2-3Thi-BztA-GlnR*3-Ala-NH2 |
| I-738 | Ac-PL3-Asp-DipA-B5-Asp-3COOHF-Phe-Ala-Phe-Lys*3-PyrS2-3Thi-BztA-GlnR*3-Ala-NH2 |
| I-739 | Ac-PL3-Asp-DipA-B5-Asp-3COOHF-Phe-Ala-Phe-Lys*3-PyrS2-3Thi-BztA-GlnR*3-Ala-NH2 |
| I-740 | Ac-PL3-Asp-DipA-B5-Asp-3COOHF-CyLeu-Ala-Phe-Lys*3-PyrS2-3Thi-BztA-GlnR*3-Ala-NH2 |
| I-741 | Ac-PL3-3COOHF-Npg-B5-Asp-Asp-Aib-Ala-Phe-Lys*3-PyrS2-3Thi-BztA-GlnR*3-Ala-NH2 |
| I-742 | Ac-PL3-Asp-Npg-B5-3COOHF-Asp-Aib-Ala-Phe-Lys*3-PyrS2-3Thi-BztA-GlnR*3-Ala-NH2 |
| I-743 | Ac-PL3-Asp-Lys**3-B5-Asp-3COOHF-GlnR**3-Ala-Phe-Lys*3-PyrS2-3Thi-BztA-GlnR*3-Ala- |
| | NH2 |
| I-744 | Ac-PL3-Asp-1MeK**3-B5-Asp-3COOHF-GlnR**3-Ala-Phe-Lys*3-PyrS2-3Thi-BztA-GlnR*3- |
| | Ala-NH2 |
| I-745 | Ac-PL3-Asp-1MeK**3-B5-Asp-3COOHF-GlnR**3-Ala-Phe-Lys*3-PyrS2-3Thi-BztA-GlnR*3- |
| | Ala-NH2 |
| I-746 | Hex-PL3-Asp-Npg-B5-Asp-3COOHF-Aib-Ala-Phe-Lys*3-PyrS2-3Thi-BztA-GlnR*3-Ala-NH2 |
| I-747 | Bua-PL3-Asp-Npg-B5-Asp-3COOHF-Aib-Ala-Phe-Lys*3-PyrS2-3Thi-BztA-GlnR*3-Ala-NH2 |
| I-748 | 2PyzCO-PL3-Asp-Npg-B5-Asp-3COOHF-Aib-Ala-Phe-Lys*3-PyrS2-3Thi-BztA-GlnR*3-Ala-NH2 |
| I-749 | 3Phc3-PL3-Asp-Npg-B5-Asp-3COOHF-Aib-Ala-Phe-Lys*3-PyrS2-3Thi-BztA-GlnR*3-Ala-NH2 |
| I-750 | MeOPr-PL3-Asp-Npg-B5-Asp-3COOHF-Aib-Ala-Phe-Lys*3-PyrS2-3Thi-BztA-GlnR*3-Ala-NH2 |
| I-751 | lithocholate-PL3-Asp-Npg-B5-Asp-3COOHF-Aib-Ala-Phe-Lys*3-PyrS2-3Thi-BztA-GlnR*3-Ala- |
| | NH2 |
| I-752 | 2FPhc-PL3-Asp-Npg-B5-Asp-3COOHF-Aib-Ala-Phe-Lys*3-PyrS2-3Thi-BztA-GlnR*3-Ala-NH2 |
| I-753 | PhC-PL3-Asp-Npg-B5-Asp-3COOHF-Aib-Ala-Phe-Lys*3-PyrS2-3Thi-BztA-GlnR*3-Ala-NH2 |
| I-754 | MeSO2-PL3-Asp-Npg-B5-Asp-3COOHF-Aib-Ala-Phe-Lys*3-PyrS2-3Thi-BztA-GlnR*3-Ala-NH2 |
| I-755 | Ts-PL3-Asp-Npg-B5-Asp-3COOHF-Aib-Ala-Phe-Lys*3-PyrS2-3Thi-BztA-GlnR*3-Ala-NH2 |
| I-756 | Ts-PL3-Asp-Npg-B5-Asp-3COOHF-Aib-Ala-Phe-Lys*3-PyrS2-3Thi-BztA-GlnR*3-Ala-NH2 |
| I-757 | Ac-PL3-Asp-Npg-B5-Asp-3COOHF-Aib-Ala-Phe-[pXyl]hCys-PyrS2-3Thi-BztA-Cys-Ala-NH2 |
| I-758 | Ac-PL3-Asp-Npg-B5-Asp-3COOHF-Aib-Ala-Phe-[pXyl]Cys-PyrS2-3Thi-BztA-hCys-Ala-NH2 |
| I-759 | Ac-PL3-Asp-Npg-B5-Asp-3COOHF-Aib-Ala-Phe-[mXyl]hCys-PyrS2-3Thi-BztA-hCys-Ala-NH2 |
| I-760 | Ac-PL3-Asp-Npg-B5-Asp-3COOHF-Aib-Ala-Phe-[pXyl]hCys-PyrS2-3Thi-BztA-hCys-Ala-NH2 |
| I-761 | Ac-PL3-Asp-Npg-B5-Asp-3COOHF-Aib-Ala-Phe-Lys*3-PyrS2-hnLeu-34ClF-GlnR*3-Ala-NH2 |
| I-762 | Ac-PL3-Asp-Npg-B5-Asp-3COOHF-Aib-Ala-Phe-Lys*3-PyrS2-hnLeu-34ClF-GlnR*3-Ala-NH2 |
| I-763 | Ac-PL3-Asp-Npg-B5-Asp-3COOHF-Aib-Ala-Phe-Lys*3-PyrS2-hnLeu-34MeF-GlnR*3-Ala-NH2 |
| I-764 | Ac-PL3-Asp-Npg-B5-Asp-3COOHF-Aib-Ala-Phe-Lys*3-PyrS2-hnLeu-34MeF-GlnR*3-Ala-NH2 |
| I-765 | Ac-PL3-Asp-Npg-B5-Asp-3COOHF-Aib-Ala-Phe-Lys*3-PyrS2-hnLeu-3BrF-GlnR*3-Ala-NH2 |
| I-766 | Ac-PL3-Asp-Npg-B5-Asp-3COOHF-Aib-Ala-Phe-Lys*3-PyrS2-hnLeu-3BrF-GlnR*3-Ala-NH2 |
| I-767 | Ac-PL3-Asp-Npg-B5-Asp-3COOHF-Aib-Ala-Phe-Lys*3-PyrS2-hnLeu-2NapA-GlnR*3-Ala-NH2 |
| I-768 | Ac-PL3-Asp-Npg-B5-Asp-3COOHF-Aib-Ala-Phe-Lys*3-PyrS2-hnLeu-2NapA-GlnR*3-Ala-NH2 |
| I-769 | Ac-PL3-Asp-Npg-B5-Asp-3COOHF-Aib-Ala-Phe-Lys*3-PyrS2-hnLeu-RbMe2NapA-GlnR*3-Ala- |
| | NH2 |
| I-770 | Ac-PL3-Asp-Npg-B5-Asp-3COOHF-Aib-Ala-Phe-Lys*3-PyrS2-hnLeu-RbMe2NapA-GlnR*3-Ala- |
| | NH2 |
| I-771 | Ac-PL3-Asp-Npg-B5-Asp-3COOHF-Aib-Ala-Phe-Lys*3-PyrS2-hnLeu-RbMeBzta-GlnR*3-Ala- |
| | NH2 |
| I-772 | Ac-PL3-Asp-Npg-B5-Asp-3COOHF-Aib-Ala-Phe-Lys*3-PyrS2-hnLeu-RbMeBzta-GlnR*3-Ala- |
| | NH2 |
| I-773 | Ac-PL3-Asp-Npg-B5-Asp-3COOHF-Aib-Ala-Phe-Lys*3-PyrS2-hnLeu-SbMeBzta-GlnR*3-Ala- |
| | NH2 |
| I-774 | Ac-PL3-Asp-Npg-B5-Asp-3COOHF-Aib-Ala-Phe-Lys*3-PyrS2-hnLeu-SbMeBzta-GlnR*3-Ala- |
| | NH2 |
| I-775 | Ac-PL3-Asp-Npg-B5-Asp-3COOHF-Aib-Ala-Phe-Lys*3-PyrS2-hnLeu-5IndA-GlnR*3-Ala-NH2 |
| I-776 | Ac-PL3-Asp-Npg-B5-Asp-3COOHF-Aib-Ala-Phe-Lys*3-PyrS2-hnLeu-5IndA-GlnR*3-Ala-NH2 |
| I-777 | Ac-PL3-Asp-Npg-B5-Asp-3COOHF-Ala-Ala-Phe-Lys*3-SPip2-2F3MeF-BztA-GlnR*3-Ala-NH2 |
| I-778 | Ac-PL3-Asp-Npg-B5-Asp-3COOHF-Ala-Ala-Phe-Lys*3-SPip3-2F3MeF-BztA-GlnR*3-Ala-NH2 |
| I-779 | Ac-PL3-Asp-Npg-B5-Asp-3COOHF-Ala-Ala-Phe-Lys*3-SPip3-2F3MeF-BztA-GlnR*3-Ala-NH2 |
| I-780 | Ac-PL3-Asp-Npg-B5-Asp-3COOHF-Ala-Ala-Phe-Lys*3-SPip2-3Thi-BztA-GlnR*3-Ala-NH2 |
| I-781 | Ac-PL3-Asp-Npg-B5-Asp-3COOHF-Ala-Ala-Phe-Lys*3-SPip3-3Thi-BztA-GlnR*3-Ala-NH2 |
| I-782 | Ac-PL3-Asp-Npg-B5-Asp-3COOHF-Aib-Ala-Phe-Lys*3-PyrS2-3Thi-BztA-GlnR*3-Ala-Ala-Ala- |
| | NH2 |
| I-783 | Ac-PL3-Asp-Npg-B5-Asp-3COOHF-Aib-Ala-Phe-Lys*3-PyrS2-3Thi-BztA-GlnR*3-Ala-Ala-Ala- |
| | Ala-Ala-NH2 |
| I-784 | Ac-PL3-Asp-Npg-B5-Asp-3COOHF-Aib-Ala-Phe-Lys*3-PyrS2-3Thi-BztA-GlnR*3-Ala-Ala-Ala- |
| | Ala-Ala-Ala-Ala-NH2 |
| I-785 | Ac-PL3-Asp-Npg-B5-Asp-3COOHF-Aib-Ala-Phe-Lys*3-PyrS2-3Thi-BztA-GlnR*3-Leu-Ser-NH2 |
| I-786 | Ac-PL3-Asp-Npg-B5-Asp-3COOHF-Aib-Ala-Phe-Lys*3-PyrS2-3Thi-BztA-hGlnR*3-NH2 |
| I-787 | Ac-PL3-Asp-Npg-B5-Asp-3COOHF-Aib-Ala-Phe-Lys*3-PyrS2-3Thi-BztA-hGlnR*3-Ala-NH2 |
| I-788 | Ac-PL3-Asp-Npg-B5-Asp-3COOHF-Aib-Ala-Phe-dDab*3-PyrS2-3Thi-BztA-GlnR*3-NH2 |
| I-789 | Ac-PL3-Asp-Npg-B5-Asp-3COOHF-Aib-Ala-Phe-dDab*3-PyrS2-3Thi-BztA-GlnR*3-Ala-Ala- |
| | Ala-NH2 |
| I-790 | Ac-PL3-Asp-Npg-B5-Asp-3COOHF-Aib-Ala-Phe-dDab*3-PyrS2-3Thi-BztA-GlnR*3-Ala-Ala- |
| | Ala-Ala-Ala-NH2 |
| I-791 | Ac-PL3-Asp-Npg-B5-Asp-3COOHF-Aib-Ala-Phe-dDab*3-PyrS2-3Thi-BztA-GlnR*3-Leu-Ser- |
| | NH2 |
| I-792 | Ac-PL3-Asp-Npg-B5-Asp-3COOHF-Aib-Ala-Phe-dOrn*3-PyrS2-3Thi-BztA-AsnR*3-NH2 |
| I-793 | Ac-PL3-Asp-Npg-B5-Asp-3COOHF-Aib-Ala-Phe-dOrn*3-PyrS2-3Thi-BztA-AsnR*3-Ala-NH2 |
| I-794 | Ac-PL3-Asp-Npg-B5-Asp-3COOHF-Aib-Ala-Phe-dOrn*3-PyrS2-3Thi-BztA-AsnR*3-Ala-NH2 |
| I-795 | Ac-PL3-Asp-Npg-B5-Asp-3COOHF-Aib-Ala-Phe-dOrn*3-PyrS2-3Thi-BztA-AsnR*3-Ala-Ala- |
| | Ala-NH2 |
| I-796 | Ac-PL3-Asp-Npg-B5-Asp-3COOHF-Aib-Ala-Phe-dOrn*3-PyrS2-3Thi-BztA-AsnR*3-Ala-Ala- |
| | Ala-NH2 |
| I-797 | Ac-PL3-Asp-Npg-B5-Asp-3COOHF-Aib-Ala-Phe-dOrn*3-PyrS2-3Thi-BztA-AsnR*3-Leu-Ser- |
| | NH2 |
| I-798 | Ac-PL3-Asp-Npg-B5-Asp-3COOHF-Aib-Ala-Phe-dOrn*3-PyrS2-3Thi-BztA-AsnR*3-Leu-Ser- |
| | NH2 |
| I-799 | Isobutyryl-PL3-Asp-Npg-B5-Asp-3COOHF-Aib-Ala-Phe-Lys*3-PyrS2-3Thi-BztA-GlnR*3-Ala- |
| | NH2 |
| I-800 | Isobutyryl-PL3-Asp-Npg-B5-Asp-3COOHF-Aib-Ala-Phe-Lys*3-PyrS2-3Thi-BztA-GlnR*3-Ala- |
| | NH2 |
| I-801 | Isovaleryl-PL3-Asp-Npg-B5-Asp-3COOHF-Aib-Ala-Phe-Lys*3-PyrS2-3Thi-BztA-GlnR*3-Ala- |
| | NH2 |
| I-802 | EtHNCO-PL3-Asp-Npg-B5-Asp-3COOHF-Aib-Ala-Phe-Lys*3-PyrS2-3Thi-BztA-GlnR*3-Ala- |
| | NH2 |
| I-803 | Ac-PL3-Asp-Npg-B5-Asp-3COOHF-Aib-Ala_D3-Phe-Lys*3-PyrS2-3Thi-BztA-GlnR*3-Ala D3- |
| | NH2 |
| I-804 | Ac-PL3-Asp-Npg-B5-Asp-3COOHF-Aib-Ala-Phe-Lys*3-PyrS2-3Thi-BztA-GlnR*3-Ala-Ala-Leu- |
| | NH2 |
| I-805 | Ac-PL3-Asp-Npg-B5-Asp-3COOHF-Aib-Ala-Phe-Lys*3-PyrS2-3Thi-BztA-GlnR*3-Ala-Ala-Leu- |
| | NH2 |
| I-806 | Ac-PL3-Asp-Npg-B5-Asp-3COOHF-Aib-Ala-Phe-Lys*3-PyrS2-3Thi-BztA-GlnR*3-Ala-Ala-Leu- |
| | Leu-NH2 |
| I-807 | Ac-PL3-Asp-Npg-B5-Asp-3COOHF-Aib-Ala-Phe-Lys*3-PyrS2-3Thi-BztA-GlnR*3-Ala-Ala-Ala- |
| | Leu-NH2 |
| I-808 | Ac-PL3-Asp-Npg-B5-Asp-3COOHF-Aib-Ala-Phe-Lys*3-PyrS2-3Thi-BztA-GlnR*3-Ala-Ala-Ala- |
| | Leu-Leu-NH2 |
| I-809 | Ac-PL3-Asp-Npg-B5-Asp-3COOHF-Aib-Ala-Phe-Lys*3-PyrS2-3Thi-BztA-GlnR*3-Ala-Ala-Ala- |
| | Leu-Leu-NH2 |
| I-810 | Ac-PL3-Asp-Npg-B5-Asp-3COOHF-Aib-Ala-Phe-Lys*3-PyrS2-3Thi-BztA-GlnR*3-Ala-Ala-Ala- |
| | Leu-Leu-Leu-NH2 |
| I-811 | Ac-PL3-Asp-Npg-B5-Asp-3COOHF-Aib-Ala-Phe-Lys*3-PyrS2-3Thi-BztA-GlnR*3-Ala-Ala-Ala- |
| | Leu-Leu-Leu-NH2 |
| I-812 | Ac-PL3-Asp-Npg-B5-Asp-3COOHF-Aib-Ala-Phe-Lys*3-PyrS2-3Thi-BztA-GlnR*3-Ala-Val-Pro- |
| | Thr-Leu-Lys-NH2 |
| I-813 | Ac-PL3-Asp-Npg-B5-Asp-3COOHF-Aib-Ala-Phe-Lys*3-PyrS2-3Thi-BztA-GlnR*3-Ala-Ala-Val- |
| | Pro-Thr-Leu-Lys-NH2 |
| I-814 | Ac-PL3-Asp-Npg-B5-Asp-3COOHF-Aib-Ala-Phe-Lys*3-PyrS2-3Thi-BztA-GlnR*3-Ala-Lys-Leu- |
| | Pro-Val-nLeu-NH2 |
| I-815 | Ac-PL3-Asp-Npg-B5-Asp-3COOHF-Aib-Ala-Phe-Lys*3-PyrS2-3Thi-BztA-GlnR*3-Ala-Ala-Lys- |
| | Leu-Pro-Val-nLeu-NH2 |
| I-816 | Ac-PL3-Asp-Npg-B5-Asp-3COOHF-Aib-Ala-Phe-Lys*3-PyrS2-3Thi-BztA-GlnR*3-Ala-Val-Pro- |
| | Ala-Leu-Arg-NH2 |
| I-817 | Ac-PL3-Asp-Npg-B5-Asp-3COOHF-Aib-Ala-Phe-Lys*3-PyrS2-3Thi-BztA-GlnR*3-Ala-Ala-Val- |
| | Pro-Ala-Leu-Arg-NH2 |
| I-818 | 5hexenyl-MePro-Asp-[Phc][Allyl]Dap-R5-Asp-3COOHF-Aib-Ala-Phe-Lys*3-PyrS2-3Thi-BztA- |
| | GlnR*3-Ala-NH2 |
| I-819 | Ac-PL3-NAsp-Npg-B5-Asp-3COOHF-Aib-Ala-Phe-Lys*3-PyrS2-3Thi-BztA-GlnR*3-Ala-NH2 |
| I-820 | Ac-PL3-Asp-Npg-B5-Asp-3COOHF-Ala-Ala-Phe-Lys*3-PyrS2-2F3MeF-BztA-GlnR*3-Val-NH2 |
| I-821 | Ac-PL3-Asp-Npg-B5-Asp-3COOHF-Ala-Ala-Phe-Lys*3-PyrS2-2F3MeF-BztA-GlnR*3-Val-NH2 |
| I-822 | Ac-PL3-Asp-Npg-B5-Asp-3COOHF-Ala-Ala-Phe-Lys*3-PyrS2-2F3MeF-BztA-GlnR*3-Val-Ser- |
| | NH2 |
| I-823 | Ac-PL3-Asp-Npg-B5-Asp-3COOHF-Ala-Ala-Phe-Lys*3-PyrS2-2F3MeF-34ClF-GlnR*3-Ala-NH2 |
| I-824 | Ac-PL3-Asp-Npg-B5-Asp-3COOHF-Ala-Ala-Phe-Lys*3-PyrS2-2F3MeF-34ClF-GlnR*3-Val-NH2 |
| I-825 | Ac-PL3-Asp-Npg-B5-Asp-3COOHF-Ala-Ala-Phe-Lys*3-PyrS2-2F3MeF-34ClF-GlnR*3-Val-NH2 |
| I-826 | Ac-PL3-Asp-Npg-B5-Asp-3COOHF-Ala-Ala-Phe-Lys*3-PyrS2-2F3MeF-34ClF-GlnR*3-Val-Ser- |
| | NH2 |
| I-827 | Ac-PL3-Asp-Npg-B5-Asp-3COOHF-Ala-Ala-Phe-Lys*3-PyrS2-2F3MeF-34ClF-GlnR*3-Leu-NH2 |
| I-828 | Ac-PL3-Asp-Npg-B5-Asp-3COOHF-Ala-Ala-Phe-Lys*3-PyrS2-2F3MeF-34ClF-GlnR*3-Leu-NH2 |
| I-829 | Ac-PL3-Asp-Npg-B5-Asp-3COOHF-Ala-Ala-Phe-Lys*3-PyrS2-2F3MeF-34ClF-GlnR*3-Leu-Ser- |
| | NH2 |
| I-830 | Ac-PL3-Asp-Npg-B5-Asp-3COOHF-Ala-Ala-Phe-Lys*3-PyrS2-2F3MeF-34ClF-GlnR*3-Leu-Ser- |
| | NH2 |
| I-831 | Ac-PL3-Asp-Npg-B5-Asp-3COOHF-Ala-Ala-Phe-Lys*3-PyrS2-Phe-34ClF-GlnR*3-Ala-NH2 |
| I-832 | Ac-PL3-Asp-Npg-B5-Asp-3COOHF-Ala-Ala-Phe-Lys*3-PyrS2-Phe-34ClF-GlnR*3-Ala-NH2 |
| I-833 | Ac-PL3-Asp-Npg-B5-Asp-3COOHF-Ala-Ala-Phe-Lys*3-PyrS2-Phe-34ClF-GlnR*3-Val-NH2 |
| I-834 | Ac-PL3-Asp-Npg-B5-Asp-3COOHF-Ala-Ala-Phe-Lys*3-PyrS2-Phe-34ClF-GlnR*3-Val-NH2 |
| I-835 | Ac-PL3-Asp-Npg-B5-Asp-3COOHF-Ala-Ala-Phe-Lys*3-PyrS2-Phe-34ClF-GlnR*3-Val-Ser-NH2 |
| I-836 | Ac-PL3-Asp-Npg-B5-Asp-3COOHF-Ala-Ala-Phe-Lys*3-PyrS2-Phe-34ClF-GlnR*3-Val-Ser-NH2 |
| I-837 | Ac-PL3-Asp-Npg-B5-Asp-3COOHF-Ala-Ala-Phe-Lys*3-PyrS2-Phe-34ClF-GlnR*3-Leu-NH2 |
| I-838 | Ac-PL3-Asp-Npg-B5-Asp-3COOHF-Ala-Ala-Phe-Lys*3-PyrS2-Phe-34ClF-GlnR*3-Leu-NH2 |
| I-839 | Ac-PL3-Asp-Npg-B5-Asp-3COOHF-Ala-Ala-Phe-Lys*3-PyrS2-Phe-34ClF-GlnR*3-Leu-Ser-NH2 |
| I-840 | Ac-PL3-Asp-Npg-B5-Asp-3COOHF-Ala-Ala-Phe-Lys*3-PyrS2-Phe-34ClF-GlnR*3-Leu-Ser-NH2 |
| I-841 | Ac-PL3-Asp-Cha-B5-Asp-3COOHF-Phe-Ala-Phe-Lys*3-PyrS2-3Thi-BztA-GlnR*3-Ala-NH2 |
| I-842 | Ac-PL3-Asp-nLeu-B5-Asp-3COOHF-Phe-Ala-Phe-Lys*3-PyrS2-3Thi-BztA-GlnR*3-Ala-NH2 |
| I-843 | Ac-PL3-Asp-Ile-B5-Asp-3COOHF-Aic-Ala-Phe-Lys*3-PyrS2-3Thi-BztA-GlnR*3-Ala-NH2 |
| I-844 | Ac-PL3-Asp-Chg-B5-Asp-3COOHF-Aic-Ala-Phe-Lys*3-PyrS2-3Thi-BztA-GlnR*3-Ala-NH2 |
| I-845 | Ac-PL3-Asp-DipA-B5-Asp-3COOHF-Aic-Ala-Phe-Lys*3-PyrS2-3Thi-BztA-GlnR*3-Ala-NH2 |
| I-846 | Ac-PL3-Asp-Cha-B5-Asp-3COOHF-Aic-Ala-Phe-Lys*3-PyrS2-3Thi-BztA-GlnR*3-Ala-NH2 |
| I-847 | Ac-PL3-Asp-Cba-B5-Asp-3COOHF-Aic-Ala-Phe-Lys*3-PyrS2-3Thi-BztA-GlnR*3-Ala-NH2 |
| I-848 | Ac-PL3-Asp-nLeu-B5-Asp-3COOHF-Aic-Ala-Phe-Lys*3-PyrS2-3Thi-BztA-GlnR*3-Ala-NH2 |
| I-849 | Ac-PL3-Asp-Ile-B5-Asp-3COOHF-CyhLeu-Ala-Phe-Lys*3-PyrS2-3Thi-BztA-GlnR*3-Ala-NH2 |
| I-850 | Ac-PL3-Asp-Chg-B5-Asp-3COOHF-CyhLeu-Ala-Phe-Lys*3-PyrS2-3Thi-BztA-GlnR*3-Ala-NH2 |
| I-851 | Ac-PL3-Asp-DipA-B5-Asp-3COOHF-CyhLeu-Ala-Phe-Lys*3-PyrS2-3Thi-BztA-GlnR*3-Ala-NH2 |
| I-852 | Ac-PL3-Asp-Cha-B5-Asp-3COOHF-CyhLeu-Ala-Phe-Lys*3-PyrS2-3Thi-BztA-GlnR*3-Ala-NH2 |
| I-853 | Ac-PL3-Asp-Cha-B5-Asp-3COOHF-CyhLeu-Ala-Phe-Lys*3-PyrS2-3Thi-BztA-GlnR*3-Ala-NH2 |
| I-854 | Ac-PL3-Asp-Cba-B5-Asp-3COOHF-CyhLeu-Ala-Phe-Lys*3-PyrS2-3Thi-BztA-GlnR*3-Ala-NH2 |
| I-855 | Ac-PL3-Asp-nLeu-B5-Asp-3COOHF-CyhLeu-Ala-Phe-Lys*3-PyrS2-3Thi-BztA-GlnR*3-Ala-NH2 |
| I-856 | Ac-PL3-Asp-Ile-B5-Asp-3COOHF-Cbg-Ala-Phe-Lys*3-PyrS2-3Thi-BztA-GlnR*3-Ala-NH2 |
| I-857 | Ac-PL3-Asp-Chg-B5-Asp-3COOHF-Cbg-Ala-Phe-Lys*3-PyrS2-3Thi-BztA-GlnR*3-Ala-NH2 |
| I-858 | Ac-PL3-Asp-DipA-B5-Asp-3COOHF-Cbg-Ala-Phe-Lys*3-PyrS2-3Thi-BztA-GlnR*3-Ala-NH2 |
| I-859 | Ac-PL3-Asp-Cha-B5-Asp-3COOHF-Cbg-Ala-Phe-Lys*3-PyrS2-3Thi-BztA-GlnR*3-Ala-NH2 |
| I-860 | Ac-PL3-Asp-Cba-B5-Asp-3COOHF-Cbg-Ala-Phe-Lys*3-PyrS2-3Thi-BztA-GlnR*3-Ala-NH2 |
| I-861 | Ac-PL3-Asp-nLeu-B5-Asp-3COOHF-Cbg-Ala-Phe-Lys*3-PyrS2-3Thi-BztA-GlnR*3-Ala-NH2 |
| I-862 | Ac-PL3-Asp-Npg-B5-Asp-3COOHF-Aib-Ala-Phe-Lys*3-PyrS2-2F3MeF-34ClF-GlnR*3-NH2 |
| I-863 | Ac-PL3-Asp-Npg-B5-Asp-3COOHF-Aib-Ala-Phe-Lys*3-PyrS2-2F3MeF-34ClF-GlnR*3-NH2 |
| I-864 | Ac-PL3-Asp-Npg-B5-Asp-3COOHF-Aib-Ala-Phe-Lys*3-PyrS2-2F3MeF-34ClF-GlnR*3-Pro-NH2 |
| I-865 | Ac-PL3-Asp-Npg-B5-Asp-3COOHF-Aib-Ala-Phe-Lys*3-PyrS2-2F3MeF-34ClF-GlnR*3-Ser-NH2 |
| I-866 | Ac-PL3-Asp-Npg-B5-Asp-3COOHF-Aib-Ala-Phe-Lys*3-PyrS2-2F3MeF-34ClF-GlnR*3-Phe-NH2 |
| I-867 | Ac-PL3-Asp-Npg-B5-Asp-3COOHF-Aib-Ala-Phe-Lys*3-PyrS2-3Thi-34ClF-GlnR*3-NH2 |
| I-868 | Ac-PL3-Asp-Npg-B5-Asp-3COOHF-Aib-Ala-Phe-Lys*3-PyrS2-3Thi-34ClF-GlnR*3-Pro-NH2 |
| I-869 | Ac-PL3-Asp-Npg-B5-Asp-3COOHF-Aib-Ala-Phe-Lys*3-PyrS2-3Thi-34ClF-GlnR*3-Ser-NH2 |
| I-870 | Ac-PL3-Asp-Npg-B5-Asp-3COOHF-Aib-Ala-Phe-Lys*3-PyrS2-3Thi-34ClF-GlnR*3-Phe-NH2 |
| I-871 | Ac-PL3-Asp-Npg-B5-Asp-3COOHF-Aib-Ala-Phe-Lys*3-PyrS2-Phe-34ClF-GlnR*3-NH2 |
| I-872 | Ac-PL3-Asp-Npg-B5-Asp-3COOHF-Aib-Ala-Phe-Lys*3-PyrS2-Phe-34ClF-GlnR*3-Pro-NH2 |
| I-873 | Ac-PL3-Asp-Npg-B5-Asp-3COOHF-Aib-Ala-Phe-Lys*3-PyrS2-Phe-34ClF-GlnR*3-Ser-NH2 |
| I-874 | Ac-PL3-Asp-Npg-B5-Asp-3COOHF-Aib-Ala-Phe-Lys*3-PyrS2-Phe-34ClF-GlnR*3-Phe-NH2 |
| I-875 | Ac-PL3-Asp-Npg-B5-Asp-TfeGA-Aib-Ala-Phe-Lys*3-PyrS2-3Thi-BztA-GlnR*3-NH2 |
| I-876 | Ac-PL3-Asp-Npg-B5-Asp-TfeGA-Aib-Ala-Phe-Lys*3-PyrS2-3Thi-BztA-GlnR*3-Ala-NH2 |
| I-877 | Ac-PL3-Asp-Npg-B5-Asp-TfeGA-Aib-Ala-Phe-Lys*3-PyrS2-3Thi-BztA-GlnR*3-Leu-Ser-NH2 |
| I-878 | Ac-PL3-Asp-Npg-B5-Asp-TfeGA-Aib-Ala-Phe-Lys*3-PyrS2-Phe-BztA-GlnR*3-NH2 |
| I-879 | Ac-PL3-Asp-Npg-B5-Asp-TfeGA-Aib-Ala-Phe-Lys*3-PyrS2-Phe-BztA-GlnR*3-Ala-NH2 |
| I-880 | Ac-PL3-Asp-Npg-B5-Asp-TfeGA-Aib-Ala-Phe-Lys*3-PyrS2-Phe-BztA-GlnR*3-Leu-Ser-NH2 |
| I-881 | Ac-PL3-Asp-Npg-B5-Asp-TfeGA-Aib-Ala-Phe-Lys*3-PyrS2-3Thi-34ClF-GlnR*3-NH2 |
| I-882 | Ac-PL3-Asp-Npg-B5-Asp-TfeGA-Aib-Ala-Phe-Lys*3-PyrS2-3Thi-34ClF-GlnR*3-Ala-NH2 |
| I-883 | Ac-PL3-Asp-Npg-B5-Asp-TfeGA-Aib-Ala-Phe-Lys*3-PyrS2-3Thi-34ClF-GlnR*3-Leu-Ser-NH2 |
| I-884 | Ac-PL3-Asp-Npg-B5-Asp-TfeGA-Aib-Ala-Phe-Lys*3-PyrS2-Phe-34ClF-GlnR*3-NH2 |
| I-885 | Ac-PL3-Asp-Npg-B5-Asp-TfeGA-Aib-Ala-Phe-Lys*3-PyrS2-Phe-34ClF-GlnR*3-Ala-NH2 |
| I-886 | Ac-PL3-Asp-Npg-B5-Asp-TfeGA-Aib-Ala-Phe-Lys*3-PyrS2-Phe-34ClF-GlnR*3-Leu-Ser-NH2 |
| I-887 | Ac-PL3-Asp-Npg-B5-Asp-TfeGA-Aib-Ala-Phe-Lys*3-PyrS2-2F3MeF-BztA-GlnR*3-NH2 |
| I-888 | Ac-PL3-Asp-Npg-B5-Asp-TfeGA-Aib-Ala-Phe-Lys*3-PyrS2-2F3MeF-BztA-GlnR*3-Leu-Ser- |
| | NH2 |
| I-889 | Ac-PL3-Asp-Npg-B5-Asp-TfeGA-Aib-Ala-Phe-Lys*3-PyrS2-2F3MeF-BztA-GlnR*3-Leu-Ser- |
| | NH2 |
| I-890 | Ac-PL3-Asp-Npg-B5-Asp-TfeGA-Aib-Ala-Phe-Lys*3-PyrS2-2F3MeF-34ClF-GlnR*3-NH2 |
| I-891 | Ac-PL3-Asp-Npg-B5-Asp-TfeGA-Aib-Ala-Phe-Lys*3-PyrS2-2F3MeF-34ClF-GlnR*3-NH2 |
| I-892 | Ac-PL3-Asp-Npg-B5-Asp-TfeGA-Aib-Ala-Phe-Lys*3-PyrS2-2F3MeF-34ClF-GlnR*3-Ala-NH2 |
| I-893 | Ac-PL3-Asp-Npg-B5-Asp-TfeGA-Aib-Ala-Phe-Lys*3-PyrS2-2F3MeF-34ClF-GlnR*3-Leu-Ser- |
| | NH2 |
| I-894 | Ac-PL3-Asp-Npg-B5-Asp-TfeGA-Ala-Ala-Phe-Lys*3-PyrS2-Phe-BztA-GlnR*3-NH2 |
| I-895 | Ac-PL3-Asp-Npg-B5-Asp-TfeGA-Ala-Ala-Phe-Lys*3-PyrS2-Phe-BztA-GlnR*3-NH2 |
| I-896 | Ac-PL3-Asp-Npg-B5-Asp-TfeGA-Ala-Ala-Phe-Lys*3-PyrS2-Phe-BztA-GlnR*3-Ala-NH2 |
| I-897 | Ac-PL3-Asp-Npg-B5-Asp-TfeGA-Ala-Ala-Phe-Lys*3-PyrS2-Phe-BztA-GlnR*3-Ala-NH2 |
| I-898 | Ac-PL3-Asp-Npg-B5-Asp-TfeGA-Ala-Ala-Phe-Lys*3-PyrS2-Phe-BztA-GlnR*3-Leu-Ser-NH2 |
| I-899 | Ac-PL3-Asp-Npg-B5-Asp-TfeGA-Ala-Ala-Phe-Lys*3-PyrS2-Phe-BztA-GlnR*3-Leu-Ser-NH2 |
| I-900 | Ac-PL3-Asp-Npg-B5-Asp-TfeGA-Phe-Ala-Phe-Lys*3-PyrS2-Phe-BztA-GlnR*3-NH2 |
| I-901 | Ac-PL3-Asp-Npg-B5-Asp-TfeGA-Phe-Ala-Phe-Lys*3-PyrS2-Phe-BztA-GlnR*3-Ala-NH2 |
| I-902 | Ac-PL3-Asp-Npg-B5-Asp-TfeGA-Phe-Ala-Phe-Lys*3-PyrS2-Phe-BztA-GlnR*3-Leu-Ser-NH2 |
| I-903 | TzPyr-PL3-Asp-Npg-B5-Asp-3COOHF-Aib-Ala-Phe-Lys*3-PyrS2-3Thi-BztA-GlnR*3-Ala-NH2 |
| I-904 | 15PyraPy-PL3-Asp-Npg-B5-Asp-3COOHF-Aib-Ala-Phe-Lys*3-PyrS2-3Thi-BztA-GlnR*3-Ala- |
| | NH2 |
| I-905 | 15PyraPy-PL3-Asp-Npg-B5-Asp-3COOHF-Aib-Ala-Phe-Lys*3-PyrS2-3Thi-BztA-GlnR*3-Ala- |
| | NH2 |
| I-906 | 8IAP-PL3-Asp-Npg-B5-Asp-3COOHF-Aib-Ala-Phe-Lys*3-PyrS2-3Thi-BztA-GlnR*3-Ala-NH2 |
| I-907 | 3PydCO-PL3-Asp-Npg-B5-Asp-3COOHF-Aib-Ala-Phe-Lys*3-PyrS2-3Thi-BztA-GlnR*3-Ala- |
| | NH2 |
| I-908 | 2PyBu-PL3-Asp-Npg-B5-Asp-3COOHF-Aib-Ala-Phe-Lys*3-PyrS2-3Thi-BztA-GlnR*3-Ala-NH2 |
| I-909 | 2PymCO-PL3-Asp-Npg-B5-Asp-3COOHF-Aib-Ala-Phe-Lys*3-PyrS2-3Thi-BztA-GlnR*3-Ala- |
| | NH2 |
| I-910 | 5PymCO-PL3-Asp-Npg-B5-Asp-3COOHF-Aib-Ala-Phe-Lys*3-PyrS2-3Thi-BztA-GlnR*3-Ala- |
| | NH2 |
| I-911 | 4PymCO-PL3-Asp-Npg-B5-Asp-3COOHF-Aib-Ala-Phe-Lys*3-PyrS2-3Thi-BztA-GlnR*3-Ala- |
| | NH2 |
| I-912 | 4PymCO-PL3-Asp-Npg-B5-Asp-3COOHF-Aib-Ala-Phe-Lys*3-PyrS2-3Thi-BztA-GlnR*3-Ala- |
| | NH2 |
| I-913 | Ac-PL3-Asp-Npg-B5-Asp-3COOHF-Aib-Ala-Phe-Lys*3-PyrS2-2Thi-34ClF-GlnR*3-Ala-NH2 |
| I-914 | Ac-PL3-Asp-Npg-B5-Asp-3COOHF-Aib-Ala-Phe-Lys*3-PyrS2-2Thi-34ClF-GlnR*3-Ala-NH2 |
| I-915 | Ac-PL3-Asp-Npg-B5-Asp-3COOHF-Aib-Ala-Phe-Lys*3-PyrS2-2Thi-34ClF-GlnR*3-Leu-Ser-NH2 |
| I-916 | Ac-PL3-Asp-Npg-B5-Asp-3COOHF-Aib-Ala-Phe-Lys*3-PyrS2-2Thi-34ClF-GlnR*3-Leu-Ser-NH2 |
| I-917 | Ac-PL3-Asp-Npg-B5-Asp-3COOHF-Leu-Ala-Phe-Lys*3-PyrS2-2Thi-34ClF-GlnR*3-Ala-NH2 |
| I-918 | Ac-PL3-Asp-Npg-B5-Asp-3COOHF-Leu-Ala-Phe-Lys*3-PyrS2-2Thi-34ClF-GlnR*3-Ala-NH2 |
| I-919 | Ac-PL3-Asp-Npg-B5-Asp-3COOHF-Phe-Ala-Phe-Lys*3-PyrS2-2Thi-34ClF-GlnR*3-Ala-NH2 |
| I-920 | Ac-PL3-Asp-Npg-B5-Asp-3COOHF-Phe-Ala-Phe-Lys*3-PyrS2-2Thi-34ClF-GlnR*3-Ala-NH2 |
| I-921 | Ac-PL3-Asp-Npg-B5-Asp-3COOHF-Aib-Ala-2Thi-Lys*3-PyrS2-2Thi-34ClF-GlnR*3-Ala-NH2 |
| I-922 | Ac-PL3-Asp-Npg-B5-Asp-3COOHF-Aib-Ala-2Thi-Lys*3-PyrS2-2Thi-34ClF-GlnR*3-Ala-NH2 |
| I-923 | Ac-PL3-Asp-Npg-B5-Asp-3COOHF-Aib-Ala-Phe-Lys*3-PyrS2-2Thi-BztA-GlnR*3-NH2 |
| I-924 | Ac-PL3-Asp-Npg-B5-Asp-3COOHF-Aib-Ala-Phe-Lys*3-PyrS2-2Thi-BztA-GlnR*3-NH2 |
| I-925 | Ac-PL3-Asp-Npg-B5-Asp-3COOHF-Aib-Ala-Phe-Lys*3-PyrS2-2Thi-BztA-GlnR*3-Leu-Ser-NH2 |
| I-926 | Ac-PL3-Asp-Npg-B5-Asp-3COOHF-Leu-Ala-Phe-Lys*3-PyrS2-2Thi-BztA-GlnR*3-Ala-NH2 |
| I-927 | Ac-PL3-Asp-Npg-B5-Asp-3COOHF-Phe-Ala-Phe-Lys*3-PyrS2-2Thi-BztA-GlnR*3-Ala-NH2 |
| I-928 | Ac-PL3-Phe-Npg-B5-Asp-3COOHF-Aib-Ala-Phe-Lys*3-PyrS2-3Thi-BztA-GlnR*3-Ala-NH2 |
| I-929 | Ac-PL3-Gln-Npg-B5-Asp-3COOHF-Aib-Ala-Phe-Lys*3-PyrS2-3Thi-BztA-GlnR*3-Ala-NH2 |
| I-930 | Ac-PL3-Gln-Npg-B5-Asp-3COOHF-Aib-Ala-Phe-Lys*3-PyrS2-3Thi-BztA-GlnR*3-Ala-NH2 |
| I-931 | Ac-PL3-3Thi-Npg-B5-Asp-3COOHF-Aib-Ala-Phe-Lys*3-PyrS2-3Thi-BztA-GlnR*3-Ala-NH2 |
| I-932 | 4pentenyl-MePro-Asp-B5-Ala-Asp-3COOHF-Ala-Ala-Phe-PyrS2-Lys*3-3Thi-BztA-Ala-GlnR*3- |
| | NH2 |
| I-933 | 4pentenyl-ThioPro-Asp-B5-Ala-Asp-3COOHF-Ala-Ala-Phe-PyrS2-Lys*3-3Thi-BztA-Ala-GlnR*3- |
| | NH2 |
| I-934 | 4pentenyl-ThioPro-Asp-B5-Ala-Asp-3COOHF-Ala-Ala-Phe-PyrS2-Lys*3-3Thi-BztA-Ala-GlnR*3- |
| | NH2 |
| I-935 | Ac-PL3-NGlu-Npg-B5-Asp-3COOHF-Aib-Ala-Phe-Lys*3-PyrS2-3Thi-BztA-GlnR*3-Ala-NH2 |
| I-936 | Ac-PL3-Asp-Npg-B5-Asp-3COOHF-Aib-Ala-Phe-Lys*3-PyrS2-HexG-BztA-GlnR*3-Ala-NH2 |
| I-937 | Ac-PL3-Asp-Npg-B5-Asp-3COOHF-Aib-Ala-Phe-Lys*3-PyrS2-HexG-BztA-GlnR*3-Ala-NH2 |
| I-938 | Ac-PL3-Asp-Npg-B5-Asp-3COOHF-Aib-Ala-Phe-Lys*3-PyrS2-HepG-BztA-GlnR*3-Ala-NH2 |
| I-939 | Ac-PL3-Asp-Npg-B5-Asp-3COOHF-Aib-Ala-Phe-Lys*3-PyrS2-HepG-BztA-GlnR*3-Ala-NH2 |
| I-940 | Ac-PL3-Asp-Npg-B5-Asp-3COOHF-Aib-Ala-Phe-Lys*3-PyrS2-BztA-BztA-GlnR*3-Ala-NH2 |
| I-941 | Ac-PL3-Asp-Npg-B5-Asp-3COOHF-Aib-Ala-Phe-Lys*3-PyrS2-BztA-BztA-GlnR*3-Ala-NH2 |
| I-942 | Ac-PL3-Asp-Npg-B5-Asp-3COOHF-Aib-Ala-Phe-Lys*3-PyrS2-HexG-34ClF-GlnR*3-Ala-NH2 |
| I-943 | Ac-PL3-Asp-Npg-B5-Asp-3COOHF-Aib-Ala-Phe-Lys*3-PyrS2-HepG-34ClF-GlnR*3-Ala-NH2 |
| I-944 | Ac-PL3-Asp-Npg-B5-Asp-3COOHF-Aib-Ala-Phe-Lys*3-PyrS2-HepG-34ClF-GlnR*3-Ala-NH2 |
| I-945 | Ac-PL3-Asp-Npg-B5-Asp-3COOHF-Aib-Ala-Phe-Lys*3-PyrS2-BztA-34ClF-GlnR*3-Ala-NH2 |
| I-946 | Ac-PL3-Asp-Npg-B5-Asp-3COOHF-Aib-Ala-Phe-Lys*3-Az3-2F3MeF-BztA-GlnR*3-Ala-NH2 |
| I-947 | Ac-PL3-Asp-Npg-B5-Asp-3COOHF-Aib-Ala-Phe-Lys*3-Az2-3Thi-BztA-GlnR*3-Ala-NH2 |
| I-948 | Ac-PL3-Asp-Npg-B5-Asp-3COOHF-Aib-Ala-Phe-Lys*3-Az3-3Thi-BztA-GlnR*3-Ala-NH2 |
| I-949 | Ac-PL3-Asp-Npg-B5-Asp-3COOHF-Aib-Ala-Phe-Lys*3-PyrS2-2PhF-BztA-GlnR*3-Ala-NH2 |
| I-950 | Ac-PL3-Asp-Npg-B5-Asp-3COOHF-Aib-Ala-Phe-Lys*3-PyrS2-2PhF-34ClF-GlnR*3-Ala-NH2 |
| I-951 | Ac-PL3-Asp-Npg-B5-Asp-3COOHF-Aib-Ala-Phe-Lys*3-PyrS2-2PhF-34ClF-GlnR*3-Ala-NH2 |
| I-952 | Ac-PL3-Asp-Npg-B5-Asp-3COOHF-Aib-Ala-Phe-Lys*3-PyrS2-2PhF-BztA-GlnR*3-Leu-Ser-NH2 |
| I-953 | Ac-PL3-Asp-Npg-B5-Asp-3COOHF-Aib-Ala-Phe-Lys*3-PyrS2-2PhF-BztA-GlnR*3-Leu-Ser-NH2 |
| I-954 | Ac-PL3-Asp-Npg-B5-Asp-3COOHF-Aib-Ala-Phe-Lys*3-PyrS2-2PhF-34ClF-GlnR*3-Leu-Ser- |
| | NH2 |
| I-955 | Ac-PL3-Asp-Npg-B5-Asp-3COOHF-Aib-Ala-Phe-Lys*3-PyrS2-hnLeu-BztA-GlnR*3-Leu-Ser- |
| | NH2 |
| I-956 | Ac-PL3-Asp-Npg-B5-Asp-3COOHF-Aib-Ala-Phe-Lys*3-PyrS2-hnLeu-34ClF-GlnR*3-Leu-Ser- |
| | NH2 |
| I-957 | Ac-PL3-isoDAsp-Npg-B5-Asp-3COOHF-Aib-Ala-Phe-Lys*3-PyrS2-3Thi-BztA-GlnR*3-Ala-NH2 |
| I-958 | Ac-PL3-isoGlu-Npg-B5-Asp-3COOHF-Aib-Ala-Phe-Lys*3-PyrS2-3Thi-BztA-GlnR*3-Ala-NH2 |
| I-959 | Ac-PL3-isoGlu-Npg-B5-Asp-3COOHF-Aib-Ala-Phe-Lys*3-PyrS2-3Thi-BztA-GlnR*3-Ala-NH2 |
| I-960 | Ac-PL3-isoDGlu-Npg-B5-Asp-3COOHF-Aib-Ala-Phe-Lys*3-PyrS2-3Thi-BztA-GlnR*3-Ala-NH2 |
| I-961 | Ac-PL3-RbGlu-Npg-B5-Asp-3COOHF-Aib-Ala-Phe-Lys*3-PyrS2-3Thi-BztA-GlnR*3-Ala-NH2 |
| I-962 | Ac-PL3-SbGlu-Npg-B5-Asp-3COOHF-Aib-Ala-Phe-Lys*3-PyrS2-3Thi-BztA-GlnR*3-Ala-NH2 |
| I-963 | Ac-PL3-isoDAsp-Npg-B5-Asp-3COOHF-Aib-Ala-Phe-Lys*3-PyrS2-3Thi-BztA-GlnR*3-Ala-NH2 |
| I-964 | Ac-PL3-isoGlu-Npg-B5-Asp-3COOHF-Aib-Ala-Phe-Lys*3-PyrS2-3Thi-BztA-GlnR*3-Ala-NH2 |
| I-965 | Ac-PL3-RbGlu-Npg-B5-Asp-3COOHF-Aib-Ala-Phe-Lys*3-PyrS2-3Thi-BztA-GlnR*3-Ala-NH2 |
| I-966 | Ac-PL3-SbGlu-Npg-B5-Asp-3COOHF-Aib-Ala-Phe-Lys*3-PyrS2-3Thi-BztA-GlnR*3-Ala-NH2 |
| I-967 | Ac-PL3-Glu-Npg-B5-Asp-3COOHF-Aib-Ala-Phe-Lys*3-PyrS2-3Thi-BztA-GlnR*3-Ala-NH2 |
| I-968 | Ac-PL3-Gln-Npg-B5-Asp-3COOHF-Aib-Ala-Phe-Lys*3-PyrS2-3Thi-BztA-GlnR*3-Ala-NH2 |
| I-969 | Ac-PL3-Asp-Ile-B5-Asp-3COOHF-Ala-Ala-Phe-Lys*3-PyrS2-3Thi-BztA-GlnR*3-Ala-NH2 |
| I-970 | Ac-PL3-Asp-Ile-B5-Asp-3COOHF-Ala-Ala-Phe-Lys*3-PyrS2-3Thi-BztA-GlnR*3-Ala-NH2 |
| I-971 | Ac-PL3-Asp-Ile-B5-Asp-3COOHF-Val-Ala-Phe-Lys*3-PyrS2-3Thi-BztA-GlnR*3-Ala-NH2 |
| I-972 | Ac-PL3-Asp-Ile-B5-Asp-3COOHF-Leu-Ala-Phe-Lys*3-PyrS2-3Thi-BztA-GlnR*3-Ala-NH2 |
| I-973 | Ac-PL3-Asp-Ile-B5-Asp-3COOHF-nLeu-Ala-Phe-Lys*3-PyrS2-3Thi-BztA-GlnR*3-Ala-NH2 |
| I-974 | Ac-PL3-Asp-Ile-B5-Asp-3COOHF-nLeu-Ala-Phe-Lys*3-PyrS2-3Thi-BztA-GlnR*3-Ala-NH2 |
| I-975 | Ac-PL3-Asp-Ile-B5-Asp-3COOHF-Dpg-Ala-Phe-Lys*3-PyrS2-3Thi-BztA-GlnR*3-Ala-NH2 |
| I-976 | Ac-PL3-Asp-Chg-B5-Asp-3COOHF-Ala-Ala-Phe-Lys*3-PyrS2-3Thi-BztA-GlnR*3-Ala-NH2 |
| I-977 | Ac-PL3-Asp-Chg-B5-Asp-3COOHF-Ala-Ala-Phe-Lys*3-PyrS2-3Thi-BztA-GlnR*3-Ala-NH2 |
| I-978 | Ac-PL3-Asp-Chg-B5-Asp-3COOHF-Val-Ala-Phe-Lys*3-PyrS2-3Thi-BztA-GlnR*3-Ala-NH2 |
| I-979 | Ac-PL3-Asp-Chg-B5-Asp-3COOHF-nLeu-Ala-Phe-Lys*3-PyrS2-3Thi-BztA-GlnR*3-Ala-NH2 |
| I-980 | Ac-PL3-Asp-Chg-B5-Asp-3COOHF-Dpg-Ala-Phe-Lys*3-PyrS2-3Thi-BztA-GlnR*3-Ala-NH2 |
| I-981 | Ac-PL3-Asp-Chg-B5-Asp-3COOHF-Dpg-Ala-Phe-Lys*3-PyrS2-3Thi-BztA-GlnR*3-Ala-NH2 |
| I-982 | Ac-PL3-Asp-DipA-B5-Asp-3COOHF-Ala-Ala-Phe-Lys*3-PyrS2-3Thi-BztA-GlnR*3-Ala-NH2 |
| I-983 | Ac-PL3-Asp-DipA-B5-Asp-3COOHF-Ala-Ala-Phe-Lys*3-PyrS2-3Thi-BztA-GlnR*3-Ala-NH2 |
| I-984 | Ac-PL3-Asp-DipA-B5-Asp-3COOHF-Val-Ala-Phe-Lys*3-PyrS2-3Thi-BztA-GlnR*3-Ala-NH2 |
| I-985 | Ac-PL3-Asp-DipA-B5-Asp-3COOHF-Leu-Ala-Phe-Lys*3-PyrS2-3Thi-BztA-GlnR*3-Ala-NH2 |
| I-986 | Ac-PL3-Asp-DipA-B5-Asp-3COOHF-nLeu-Ala-Phe-Lys*3-PyrS2-3Thi-BztA-GlnR*3-Ala-NH2 |
| I-987 | Ac-PL3-Asp-Cba-B5-Asp-3COOHF-Ala-Ala-Phe-Lys*3-PyrS2-3Thi-BztA-GlnR*3-Ala-NH2 |
| I-988 | Ac-PL3-Asp-Cba-B5-Asp-3COOHF-Val-Ala-Phe-Lys*3-PyrS2-3Thi-BztA-GlnR*3-Ala-NH2 |
| I-989 | Ac-PL3-Asp-Cba-B5-Asp-3COOHF-Leu-Ala-Phe-Lys*3-PyrS2-3Thi-BztA-GlnR*3-Ala-NH2 |
| I-990 | Ac-PL3-Asp-Cba-B5-Asp-3COOHF-nLeu-Ala-Phe-Lys*3-PyrS2-3Thi-BztA-GlnR*3-Ala-NH2 |
| I-991 | Ac-PL3-Asp-Cba-B5-Asp-3COOHF-Dpg-Ala-Phe-Lys*3-PyrS2-3Thi-BztA-GlnR*3-Ala-NH2 |
| I-992 | 5hexenyl-MePro-Asp-B5-Ala-Asp-3COOHF-Ala-Ala-Phe-PyrS2-Lys*3-3Thi-BztA-Ala-GlnR*3- |
| | NH2 |
| I-993 | 4pentenyl-MePro-Asp-B5-Ala-Asp-3COOHF-Ala-Ala-Phe-PyrS2-Lys*3-3Thi-BztA-Ala-GlnR*3- |
| | NH2 |
| I-994 | Ac-PL3-Asp-Chg-B5-Asp-3COOHF-Gly-Ala-Phe-Lys*3-PyrS2-3Thi-BztA-GlnR*3-Ala-NH2 |
| I-995 | Ac-PL3-Asp-Chg-B5-Asp-3COOHF-Gly-Ala-Phe-Lys*3-PyrS2-3Thi-BztA-GlnR*3-Ala-NH2 |
| I-996 | Ac-PL3-Asp-Chg-B5-Asp-3COOHF-dAla-Ala-Phe-Lys*3-PyrS2-3Thi-BztA-GlnR*3-Ala-NH2 |
| I-997 | Ac-PL3-Asp-Chg-B5-Asp-3COOHF-Aib-Thr-Phe-Lys*3-PyrS2-3Thi-BztA-GlnR*3-Ala-NH2 |
| I-998 | Ac-PL3-Asp-Chg-B5-Asp-3COOHF-Aib-aThr-Phe-Lys*3-PyrS2-3Thi-BztA-GlnR*3-Ala-NH2 |
| I-999 | Ac-PL3-Asp-Chg-B5-Asp-3COOHF-Aib-Gly-Phe-Lys*3-PyrS2-3Thi-BztA-GlnR*3-Ala-NH2 |
| I-1000 | Ac-PL3-Asp-DipA-B5-Asp-3COOHF-Gly-Ala-Phe-Lys*3-PyrS2-3Thi-BztA-GlnR*3-Ala-NH2 |
| I-1001 | Ac-PL3-Asp-DipA-B5-Asp-3COOHF-Gly-Ala-Phe-Lys*3-PyrS2-3Thi-BztA-GlnR*3-Ala-NH2 |
| I-1002 | Ac-PL3-Asp-DipA-B5-Asp-3COOHF-dAla-Ala-Phe-Lys*3-PyrS2-3Thi-BztA-GlnR*3-Ala-NH2 |
| I-1003 | Ac-PL3-Asp-DipA-B5-Asp-3COOHF-dAla-Ala-Phe-Lys*3-PyrS2-3Thi-BztA-GlnR*3-Ala-NH2 |
| I-1004 | Ac-PL3-Asp-DipA-B5-Asp-3COOHF-Aib-Ser-Phe-Lys*3-PyrS2-3Thi-BztA-GlnR*3-Ala-NH2 |
| I-1005 | Ac-PL3-Asp-DipA-B5-Asp-3COOHF-Aib-Thr-Phe-Lys*3-PyrS2-3Thi-BztA-GlnR*3-Ala-NH2 |
| I-1006 | Ac-PL3-Asp-DipA-B5-Asp-3COOHF-Aib-aThr-Phe-Lys*3-PyrS2-3Thi-BztA-GlnR*3-Ala-NH2 |
| I-1007 | Ac-PL3-Asp-DipA-B5-Asp-3COOHF-Aib-aThr-Phe-Lys*3-PyrS2-3Thi-BztA-GlnR*3-Ala-NH2 |
| I-1008 | Ac-PL3-Asp-DipA-B5-Asp-3COOHF-Aib-Gly-Phe-Lys*3-PyrS2-3Thi-BztA-GlnR*3-Ala-NH2 |
| I-1009 | Ac-PL3-Asp-DipA-B5-Asp-3COOHF-Aib-Gly-Phe-Lys*3-PyrS2-3Thi-BztA-GlnR*3-Ala-NH2 |
| I-1010 | Ac-PL3-Asp-Ile-B5-Asp-3COOHF-Aib-Ala-Phe-Lys*3-PyrS2-3Thi-34ClF-GlnR*3-Ala-NH2 |
| I-1011 | Ac-PL3-Asp-Npg-B5-Asp-3COOHF-CyLeu-Ser-Phe-Lys*3-PyrS2-3Thi-BztA-GlnR*3-Ala-NH2 |
| I-1012 | Ac-PL3-Asp-Npg-B5-Asp-3COOHF-Phe-Ser-Phe-Lys*3-PyrS2-3Thi-BztA-GlnR*3-Ala-NH2 |
| I-1013 | Ac-PL3-Asp-Npg-B5-Asp-3COOHF-Val-Ser-Phe-Lys*3-PyrS2-3Thi-BztA-GlnR*3-Ala-NH2 |
| I-1014 | Ac-PL3-Asp-Npg-B5-Asp-3COOHF-CyLeu-Gly-Phe-Lys*3-PyrS2-3Thi-BztA-GlnR*3-Ala-NH2 |
| I-1015 | Ac-PL3-Asp-Npg-B5-Asp-3COOHF-Phe-Gly-Phe-Lys*3-PyrS2-3Thi-BztA-GlnR*3-Ala-NH2 |
| I-1016 | Ac-PL3-Asp-Npg-B5-Asp-3COOHF-Val-Gly-Phe-Lys*3-PyrS2-3Thi-BztA-GlnR*3-Ala-NH2 |
| I-1017 | Ac-PL3-Asp-Npg-B5-Asp-3COOHF-CyLeu-nLeu-Phe-Lys*3-PyrS2-3Thi-BztA-GlnR*3-Ala-NH2 |
| I-1018 | Ac-PL3-Asp-Npg-B5-Asp-3COOHF-Phe-nLeu-Phe-Lys*3-PyrS2-3Thi-BztA-GlnR*3-Ala-NH2 |
| I-1019 | Ac-PL3-Asp-Npg-B5-Asp-3COOHF-Val-nLeu-Phe-Lys*3-PyrS2-3Thi-BztA-GlnR*3-Ala-NH2 |
| I-1020 | Ac-PL3-Asp-Npg-B5-Asp-3COOHF-CyLeu-aThr-Phe-Lys*3-PyrS2-3Thi-BztA-GlnR*3-Ala-NH2 |
| I-1021 | Ac-PL3-Asp-Npg-B5-Asp-3COOHF-Val-aThr-Phe-Lys*3-PyrS2-3Thi-BztA-GlnR*3-Ala-NH2 |
| I-1022 | 5hexenyl-MePro-Asp-S3-R5-Asp-3COOHF-Aib-Ala-Phe-Lys*3-PyrS2-3Thi-BztA-GlnR*3-Ala- |
| | NH2 |
| I-1023 | Ac-PL3-Asp-Npg-B5-Asp-3COOHF-Aib-Ala-Phe-Lys*3-PyrS1-3Thi-BztA-GlnR*3-Ala-NH2 |
| I-1024 | Ac-PL3-Glu-Npg-B5-Glu-3COOHF-Aib-Ala-Phe-Lys*3-PyrS2-3Thi-34ClF-GlnR*3-NH2 |
| I-1025 | 2PyBu-PL3-Glu-Npg-B5-Glu-3COOHF-Aib-Ala-Phe-Lys*3-PyrS2-3Thi-BztA-GlnR*3-Ala-NH2 |
| I-1026 | Ac-PL3-Asp-Npg-B5-Asp-3COOHF-[Ac]Acp-Ala-Phe-Lys*3-PyrS2-3Thi-BztA-GlnR*3-Ala-NH2 |
| I-1027 | Ac-PL3-Asp-Npg-B5-Asp-3COOHF-[Ac]Acp-Ala-Phe-Lys*3-PyrS2-3Thi-BztA-GlnR*3-Ala-NH2 |
| I-1028 | Ac-PL3-Asp-Npg-B5-Asp-3COOHF-[Phc]Acp-Ala-Phe-Lys*3-PyrS2-3Thi-BztA-GlnR*3-Ala-NH2 |
| I-1029 | Ac-PL3-Asp-Npg-B5-Asp-3COOHF-[Phc]Acp-Ala-Phe-Lys*3-PyrS2-3Thi-BztA-GlnR*3-Ala-NH2 |
| I-1030 | Ac-PL3-Asp-Npg-B5-Asp-3COOHF-[isovaleryl]Acp-Ala-Phe-Lys*3-PyrS2-3Thi-BztA-GlnR*3- |
| | Ala-NH2 |
| I-1031 | Ac-PL3-Asp-Npg-B5-Asp-3COOHF-[Ac]PyrSa-Ala-Phe-Lys*3-PyrS2-3Thi-BztA-GlnR*3-Ala- |
| | NH2 |
| I-1032 | Ac-PL3-Asp-Npg-B5-Asp-3COOHF-[Phc]PyrSa-Ala-Phe-Lys*3-PyrS2-3Thi-BztA-GlnR*3-Ala- |
| | NH2 |
| I-1033 | Ac-PL3-Asp-Npg-B5-Asp-3COOHF-[isovaleryl]PyrSa-Ala-Phe-Lys*3-PyrS2-3Thi-BztA-GlnR*3- |
| | Ala-NH2 |
| I-1034 | Ac-PL3-Asp-Npg-B5-Asp-3COOHF-[Ac]PyrRa-Ala-Phe-Lys*3-PyrS2-3Thi-BztA-GlnR*3-Ala- |
| | NH2 |
| I-1035 | Ac-PL3-Asp-Npg-B5-Asp-3COOHF-[Phc]PyrRa-Ala-Phe-Lys*3-PyrS2-3Thi-BztA-GlnR*3-Ala- |
| | NH2 |
| I-1036 | Ac-PL3-Asp-Npg-B5-Asp-3COOHF-[isovaleryl]PyrRa-Ala-Phe-Lys*3-PyrS2-3Thi-BztA-GlnR*3- |
| | Ala-NH2 |
| I-1037 | Ac-PL3-Asp-Chg-B5-Asp-3COOHF-Aib-Ala-Phe-Lys*3-PyrS2-3Thi-34ClF-GlnR*3-NH2 |
| I-1038 | Ac-PL3-Asp-Cha-B5-Asp-3COOHF-Aib-Ala-Phe-Lys*3-PyrS2-3Thi-34ClF-GlnR*3-NH2 |
| I-1039 | Ac-PL3-Asp-Cha-B5-Asp-3COOHF-Aib-Ala-Phe-Lys*3-PyrS2-3Thi-34ClF-GlnR*3-NH2 |
| I-1040 | Ac-PL3-Asp-Ile-B5-Asp-3COOHF-CyLeu-Ala-Phe-Lys*3-PyrS2-3Thi-34ClF-GlnR*3-NH2 |
| I-1041 | Ac-PL3-Asp-Ile-B5-Asp-3COOHF-CyLeu-Ala-Phe-Lys*3-PyrS2-3Thi-34ClF-GlnR*3-NH2 |
| I-1042 | Ac-PL3-Asp-Npg-B5-Asp-3COOHF-CyLeu-Ala-Phe-Lys*3-PyrS2-3Thi-34ClF-GlnR*3-NH2 |
| I-1043 | Ac-PL3-Asp-Npg-B5-Asp-3COOHF-CyLeu-Ala-Phe-Lys*3-PyrS2-3Thi-34ClF-GlnR*3-NH2 |
| I-1044 | Ac-PL3-Asp-Chg-B5-Asp-3COOHF-CyLeu-Ala-Phe-Lys*3-PyrS2-3Thi-34ClF-GlnR*3-NH2 |
| I-1045 | Ac-PL3-Asp-Chg-B5-Asp-3COOHF-CyLeu-Ala-Phe-Lys*3-PyrS2-3Thi-34ClF-GlnR*3-NH2 |
| I-1046 | Ac-PL3-Asp-Cha-B5-Asp-3COOHF-CyLeu-Ala-Phe-Lys*3-PyrS2-3Thi-34ClF-GlnR*3-NH2 |
| I-1047 | Ac-PL3-Asp-Cha-B5-Asp-3COOHF-CyLeu-Ala-Phe-Lys*3-PyrS2-3Thi-34ClF-GlnR*3-NH2 |
| I-1048 | Ac-PL3-Asp-Chg-B5-Asp-3COOHF-Aib-Ala-Phe-Lys*3-PyrS2-Phe-34ClF-GlnR*3-NH2 |
| I-1049 | Ac-PL3-Asp-Chg-B5-Asp-3COOHF-Aib-Ala-Phe-Lys*3-PyrS2-Phe-34ClF-GlnR*3-NH2 |
| I-1050 | Ac-PL3-Asp-Cha-B5-Asp-3COOHF-Aib-Ala-Phe-Lys*3-PyrS2-Phe-34ClF-GlnR*3-NH2 |
| I-1051 | Ac-PL3-Asp-Cha-B5-Asp-3COOHF-Aib-Ala-Phe-Lys*3-PyrS2-Phe-34ClF-GlnR*3-NH2 |
| I-1052 | Ac-PL3-Asp-Ile-B5-Asp-3COOHF-CyLeu-Ala-Phe-Lys*3-PyrS2-Phe-34ClF-GlnR*3-NH2 |
| I-1053 | Ac-PL3-Asp-Ile-B5-Asp-3COOHF-CyLeu-Ala-Phe-Lys*3-PyrS2-Phe-34ClF-GlnR*3-NH2 |
| I-1054 | Ac-PL3-Asp-Npg-B5-Asp-3COOHF-CyLeu-Ala-Phe-Lys*3-PyrS2-Phe-34ClF-GlnR*3-NH2 |
| I-1055 | Ac-PL3-Asp-Npg-B5-Asp-3COOHF-CyLeu-Ala-Phe-Lys*3-PyrS2-Phe-34ClF-GlnR*3-NH2 |
| I-1056 | Ac-PL3-Asp-Chg-B5-Asp-3COOHF-CyLeu-Ala-Phe-Lys*3-PyrS2-Phe-34ClF-GlnR*3-NH2 |
| I-1057 | Ac-PL3-Asp-Chg-B5-Asp-3COOHF-CyLeu-Ala-Phe-Lys*3-PyrS2-Phe-34ClF-GlnR*3-NH2 |
| I-1058 | Ac-PL3-Asp-Cha-B5-Asp-3COOHF-CyLeu-Ala-Phe-Lys*3-PyrS2-Phe-34ClF-GlnR*3-NH2 |
| I-1059 | Ac-PL3-Asp-Cha-B5-Asp-3COOHF-CyLeu-Ala-Phe-Lys*3-PyrS2-Phe-34ClF-GlnR*3-NH2 |
| I-1060 | Ac-PL3-Asp-Npg-B5-Asp-SbMeAsp-Aib-Ala-Phe-Lys*3-PyrS2-Phe-34ClF-GlnR*3-NH2 |
| I-1061 | Ac-PL3-Asp-Npg-B5-Asp-bMe2Asp-Aib-Ala-Phe-Lys*3-PyrS2-Phe-34ClF-GlnR*3-NH2 |
| I-1062 | 1Imidac-PL3-Asp-Npg-B5-Asp-3COOHF-Aib-Ala-Phe-Lys*3-PyrS2-3Thi-BztA-GlnR*3-Ala-NH2 |
| I-1063 | 2F2PyAc-PL3-Asp-Npg-B5-Asp-3COOHF-Aib-Ala-Phe-Lys*3-PyrS2-3Thi-BztA-GlnR*3-Ala- |
| | NH2 |
| I-1064 | 2IAPAc-PL3-Asp-Npg-B5-Asp-3COOHF-Aib-Ala-Phe-Lys*3-PyrS2-3Thi-BztA-GlnR*3-Ala-NH2 |
| I-1065 | 124TriPr-PL3-Asp-Npg-B5-Asp-3COOHF-Aib-Ala-Phe-Lys*3-PyrS2-3Thi-BztA-GlnR*3-Ala- |
| | NH2 |
| I-1066 | 6QuiAc-PL3-Asp-Npg-B5-Asp-3COOHF-Aib-Ala-Phe-Lys*3-PyrS2-3Thi-BztA-GlnR*3-Ala-NH2 |
| I-1067 | 3Py Ac-PL3-Asp-Npg-B5-Asp-3COOHF-Aib-Ala-Phe-Lys*3-PyrS2-3Thi-BztA-GlnR*3-Ala-NH2 |
| I-1068 | 123TriAc-PL3-Asp-Npg-B5-Asp-3COOHF-Aib-Ala-Phe-Lys*3-PyrS2-3Thi-BztA-GlnR*3-Ala- |
| | NH2 |
| I-1069 | 1Pyrazole Ac-PL3-Asp-Npg-B5-Asp-3COOHF-Aib-Ala-Phe-Lys*3-PyrS2-3Thi-BztA-GlnR*3-Ala- |
| | NH2 |
| I-1070 | 4PyPrpc-PL3-Asp-Npg-B5-Asp-3COOHF-Aib-Ala-Phe-Lys*3-PyrS2-3Thi-BztA-GlnR*3-Ala-NH2 |
| I-1071 | 4PyPrpc-PL3-Asp-Npg-B5-Asp-3COOHF-Aib-Ala-Phe-Lys*3-PyrS2-3Thi-BztA-GlnR*3-Ala-NH2 |
| I-1072 | 3PyPrpc-PL3-Asp-Npg-B5-Asp-3COOHF-Aib-Ala-Phe-Lys*3-PyrS2-3Thi-BztA-GlnR*3-Ala-NH2 |
| I-1073 | 5PymAc-PL3-Asp-Npg-B5-Asp-3COOHF-Aib-Ala-Phe-Lys*3-PyrS2-3Thi-BztA-GlnR*3-Ala-NH2 |
| I-1074 | 1PydoneAc-PL3-Asp-Npg-B5-Asp-3COOHF-Aib-Ala-Phe-Lys*3-PyrS2-3Thi-BztA-GlnR*3-Ala- |
| | NH2 |
| I-1075 | 124TriAc-PL3-Asp-Npg-B5-Asp-3COOHF-Aib-Ala-Phe-Lys*3-PyrS2-3Thi-BztA-GlnR*3-Ala- |
| | NH2 |
| I-1076 | 3IAPAc-PL3-Asp-Npg-B5-Asp-3COOHF-Aib-Ala-Phe-Lys*3-PyrS2-3Thi-BztA-GlnR*3-Ala-NH2 |
| I-1077 | 3IAPAc-PL3-Asp-Npg-B5-Asp-3COOHF-Aib-Ala-Phe-Lys*3-PyrS2-3Thi-BztA-GlnR*3-Ala-NH2 |
| I-1078 | Me2NAc-PL3-Asp-Npg-B5-Asp-3COOHF-Aib-Ala-Phe-Lys*3-PyrS2-3Thi-BztA-GlnR*3-Ala- |
| | NH2 |
| I-1079 | 4MePipzPrpC-PL3-Asp-Npg-B5-Asp-3COOHF-Aib-Ala-Phe-Lys*3-PyrS2-3Thi-BztA-GlnR*3- |
| | Ala-NH2 |
| I-1080 | 4MePipzPrpC-PL3-Asp-Npg-B5-Asp-3COOHF-Aib-Ala-Phe-Lys*3-PyrS2-3Thi-BztA-GlnR*3- |
| | Ala-NH2 |
| I-1081 | MePipAc-PL3-Asp-Npg-B5-Asp-3COOHF-Aib-Ala-Phe-Lys*3-PyrS2-3Thi-BztA-GlnR*3-Ala- |
| | NH2 |
| I-1082 | MePipAc-PL3-Asp-Npg-B5-Asp-3COOHF-Aib-Ala-Phe-Lys*3-PyrS2-3Thi-BztA-GlnR*3-Ala- |
| | NH2 |
| I-1083 | MeImid4SO2-PL3-Asp-Npg-B5-Asp-3COOHF-Aib-Ala-Phe-Lys*3-PyrS2-3Thi-BztA-GlnR*3- |
| | Ala-NH2 |
| I-1084 | MeImid4SO2-PL3-Asp-Npg-B5-Asp-3COOHF-Aib-Ala-Phe-Lys*3-PyrS2-3Thi-BztA-GlnR*3- |
| | Ala-NH2 |
| I-1085 | 8QuiSO2-PL3-Asp-Npg-B5-Asp-3COOHF-Aib-Ala-Phe-Lys*3-PyrS2-3Thi-BztA-GlnR*3-Ala- |
| | NH2 |
| I-1086 | Ac-PL3-Asp-Npg-B5-Asp-3COOHF-Aib-Ala-Phe-TriAzLys*3-PyrS2-3Thi-34ClF-sAla*3-NH2 |
| I-1087 | Ac-PL3-Asp-Npg-B5-Asp-3COOHF-Aib-Ala-Phe-TriAzLys*3-PyrS2-3Thi-34ClF-sAla*3-NH2 |
| I-1088 | Ac-PL3-Asp-Npg-B5-Asp-3COOHF-Aib-Ala-Phe-TriAzLys*3-PyrS2-3Thi-34ClF-sAla*3-Ala- |
| | NH2 |
| I-1089 | Ac-PL3-Asp-Ile-B5-Asp-3COOHF-Aib-Ala-Phe-TriAzLys*3-PyrS2-3Thi-34ClF-sAla*3-NH2 |
| I-1090 | Ac-PL3-Asp-Ile-B5-Asp-3COOHF-Phe-Ala-Phe-TriAzLys*3-PyrS2-3Thi-34ClF-sAla*3-NH2 |
| I-1091 | Ac-PL3-Asp-Ile-B5-Asp-3COOHF-Phe-Ala-Phe-TriAzLys*3-PyrS2-3Thi-34ClF-sAla*3-Ala-NH2 |
| I-1092 | Ac-PL3-Asp-Npg-B5-Asp-3COOHF-Aib-Ala-Phe-TriAzLys*3-PyrS2-Phe-34ClF-sAla*3-NH2 |
| I-1093 | Ac-PL3-Asp-Npg-B5-Asp-3COOHF-Aib-Ala-Phe-TriAzLys*3-PyrS2-Phe-34ClF-sAla*3-Ala-NH2 |
| I-1094 | Ac-PL3-Asp-Ile-B5-Asp-3COOHF-Aib-Ala-Phe-TriAzLys*3-PyrS2-Phe-34ClF-sAla*3-NH2 |
| I-1095 | Ac-PL3-Asp-Ile-B5-Asp-3COOHF-Aib-Ala-Phe-TriAzLys*3-PyrS2-Phe-34ClF-sAla*3-Ala-NH2 |
| I-1096 | Ac-PL3-Asp-Ile-B5-Asp-3COOHF-Phe-Ala-Phe-TriAzLys*3-PyrS2-Phe-34ClF-sAla*3-NH2 |
| I-1097 | Ac-PL3-Asp-Ile-B5-Asp-3COOHF-Phe-Ala-Phe-TriAzLys*3-PyrS2-Phe-34ClF-sAla*3-Ala-NH2 |
| I-1098 | Ac-PL3-Asp-Npg-B5-Asp-3COOHF-Aib-Ala-Phe-Lys*3-PyrS2-3Thi-34MeF-GlnR*3-NH2 |
| I-1099 | Ac-PL3-Asp-Ile-B5-Asp-3COOHF-Aib-Ala-Phe-Lys*3-PyrS2-3Thi-34MeF-GlnR*3-Ala-NH2 |
| I-1100 | Ac-PL3-Asp-Ile-B5-Asp-3COOHF-Aib-Ala-Phe-Lys*3-PyrS2-3Thi-34MeF-GlnR*3-NH2 |
| I-1101 | Ac-PL3-Asp-Ile-B5-Asp-3COOHF-Phe-Ala-Phe-Lys*3-PyrS2-3Thi-34MeF-GlnR*3-Ala-NH2 |
| I-1102 | Ac-PL3-Asp-Ile-B5-Asp-3COOHF-Phe-Ala-Phe-Lys*3-PyrS2-3Thi-34MeF-GlnR*3-NH2 |
| I-1103 | Ac-PL3-Asp-Npg-B5-Asp-3COOHF-Aib-Ala-Phe-Lys*3-PyrS2-Phe-34MeF-GlnR*3-NH2 |
| I-1104 | Ac-PL3-Asp-Ile-B5-Asp-3COOHF-Aib-Ala-Phe-Lys*3-PyrS2-Phe-34MeF-GlnR*3-Ala-NH2 |
| I-1105 | Ac-PL3-Asp-Ile-B5-Asp-3COOHF-Aib-Ala-Phe-Lys*3-PyrS2-Phe-34MeF-GlnR*3-NH2 |
| I-1106 | Ac-PL3-Asp-Ile-B5-Asp-3COOHF-Phe-Ala-Phe-Lys*3-PyrS2-Phe-34MeF-GlnR*3-Ala-NH2 |
| I-1107 | Ac-PL3-Asp-Ile-B5-Asp-3COOHF-Phe-Ala-Phe-Lys*3-PyrS2-Phe-34MeF-GlnR*3-NH2 |
| I-1108 | Ac-PL3-Asp-DipA-B5-Asp-3COOHF-Aib-Ala-Phe-Lys*3-PyrS2-3Thi-34ClF-GlnR*3-NH2 |
| I-1109 | Ac-PL3-Asp-DipA-B5-Asp-3COOHF-Aib-Ala-Phe-Lys*3-PyrS2-3Thi-34ClF-GlnR*3-Ala-NH2 |
| I-1110 | Ac-PL3-Asp-DipA-B5-Asp-3COOHF-Aib-Ala-Phe-Lys*3-PyrS2-3Thi-34ClF-GlnR*3-Ser-NH2 |
| I-1111 | Ac-PL3-Asp-DipA-B5-Asp-3COOHF-Ala-Ala-Phe-Lys*3-PyrS2-3Thi-34ClF-GlnR*3-NH2 |
| I-1112 | Ac-PL3-Asp-DipA-B5-Asp-3COOHF-Ala-Ala-Phe-Lys*3-PyrS2-3Thi-34ClF-GlnR*3-Ala-NH2 |
| I-1113 | Ac-PL3-Asp-DipA-B5-Asp-3COOHF-Ala-Ala-Phe-Lys*3-PyrS2-3Thi-34ClF-GlnR*3-Ser-NH2 |
| I-1114 | Ac-PL3-Asp-DipA-B5-Asp-3COOHF-Phe-Ala-Phe-Lys*3-PyrS2-3Thi-34ClF-GlnR*3-NH2 |
| I-1115 | Ac-PL3-Asp-DipA-B5-Asp-3COOHF-Phe-Ala-Phe-Lys*3-PyrS2-3Thi-34ClF-GlnR*3-Ala-NH2 |
| I-1116 | Ac-PL3-Asp-DipA-B5-Asp-3COOHF-Phe-Ala-Phe-Lys*3-PyrS2-3Thi-34ClF-GlnR*3-Ser-NH2 |
| I-1117 | Ac-PL3-Asp-DipA-B5-Asp-3COOHF-CyLeu-Ala-Phe-Lys*3-PyrS2-3Thi-34ClF-GlnR*3-NH2 |
| I-1118 | Ac-PL3-Asp-DipA-B5-Asp-3COOHF-CyLeu-Ala-Phe-Lys*3-PyrS2-3Thi-34ClF-GlnR*3-Ala-NH2 |
| I-1119 | Ac-PL3-Asp-DipA-B5-Asp-3COOHF-CyLeu-Ala-Phe-Lys*3-PyrS2-3Thi-34ClF-GlnR*3-Ser-NH2 |
| I-1120 | Ac-PL3-Asp-Npg-B5-Asp-3COOHF-Aib-Ala-Phe-TriAzLys*3-PyrSc72SMe3ROMe-3Thi-BztA- |
| | sAla*3-Ala-NH2 |
| I-1121 | Ac-PL3-Asp-Npg-B5-Asp-3COOHF-Aib-Ala-Phe-TriAzLys*3-PyrSc72RMe3SOMe-3Thi-BztA- |
| | sAla*3-Ala-NH2 |
| I-1122 | Ac-PL3-Asp-Npg-B5-Asp-3COOHF-Aib-Ala-Phe-TriAzLys*3-[SMeIso2]PyrSc704-3Thi-BztA- |
| | sAla*3-Ala-NH2 |
| I-1123 | Ac-PL3-Asp-Npg-B5-Asp-3COOHF-Aib-Ala-Phe-TriAzLys*3-[RMeIso2]PyrSc704-3Thi-BztA- |
| | sAla*3-Ala-NH2 |
| I-1124 | Ac-PL3-Asp-Npg-B5-Asp-3COOHF-Aib-Ala-Phe-TriAzLys*3-PyrSc73Me2-3Thi-BztA-sAla*3- |
| | Ala-NH2 |
| I-1125 | Ac-PL3-Asp-Npg-B5-Asp-3COOHF-Aib-Ala-Phe-TriAzLys*3-PyrSc7-3Thi-BztA-sAla*3-Ala- |
| | NH2 |
| I-1126 | Ac-PL3-Asp-Npg-B5-Asp-3COOHF-Aib-Ala-Phe-TriAzLys*3-[CO][Ala]PyrSa-3Thi-BztA- |
| | sAla*3-Ala-NH2 |
| I-1127 | Ac-PL3-Asp-Npg-B5-Asp-3COOHF-Aib-Ala-Phe-TriAzLys*3-[CO][dAla]PyrSa-3Thi-BztA- |
| | sAla*3-Ala-NH2 |
| I-1128 | Ac-S5-Ser-Asp-Npg-B5-Asp-3COOHF-Aib-Ala-Phe-Lys*3-PyrS2-3Thi-BztA-GlnR*3-Ala-NH2 |
| I-1129 | Ac-S5-Ser-Asp-Npg-B5-Asp-3COOHF-Aib-Ala-Phe-Lys*3-PyrS2-3Thi-BztA-GlnR*3-Ala-NH2 |
| I-1130 | Ac-S5-Val-Asp-Npg-B5-Asp-3COOHF-Aib-Ala-Phe-Lys*3-PyrS2-3Thi-BztA-GlnR*3-Ala-NH2 |
| I-1131 | Ac-S5-Val-Asp-Npg-B5-Asp-3COOHF-Aib-Ala-Phe-Lys*3-PyrS2-3Thi-BztA-GlnR*3-Ala-NH2 |
| I-1132 | Ac-S5-Leu-Asp-Npg-B5-Asp-3COOHF-Aib-Ala-Phe-Lys*3-PyrS2-3Thi-BztA-GlnR*3-Ala-NH2 |
| I-1133 | Ac-S5-Leu-Asp-Npg-B5-Asp-3COOHF-Aib-Ala-Phe-Lys*3-PyrS2-3Thi-BztA-GlnR*3-Ala-NH2 |
| I-1134 | Ac-S5-Thr-Asp-Npg-B5-Asp-3COOHF-Aib-Ala-Phe-Lys*3-PyrS2-3Thi-BztA-GlnR*3-Ala-NH2 |
| I-1135 | Ac-S5-Thr-Asp-Npg-B5-Asp-3COOHF-Aib-Ala-Phe-Lys*3-PyrS2-3Thi-BztA-GlnR*3-Ala-NH2 |
| I-1136 | Ac-S5-Phe-Asp-Npg-B5-Asp-3COOHF-Aib-Ala-Phe-Lys*3-PyrS2-3Thi-BztA-GlnR*3-Ala-NH2 |
| I-1137 | Ac-S5-Phe-Asp-Npg-B5-Asp-3COOHF-Aib-Ala-Phe-Lys*3-PyrS2-3Thi-BztA-GlnR*3-Ala-NH2 |
| I-1138 | Ac-Pro-S5-Ala-Asp-Npg-B5-Asp-3COOHF-Aib-Ala-Phe-Lys*3-PyrS2-3Thi-BztA-GlnR*3-Ala- |
| | NH2 |
| I-1139 | Ac-Pro-S5-Ala-Asp-Npg-B5-Asp-3COOHF-Aib-Ala-Phe-Lys*3-PyrS2-3Thi-BztA-GlnR*3-Ala- |
| | NH2 |
| I-1140 | Ac-Ser-S5-Ala-Asp-Npg-B5-Asp-3COOHF-Aib-Ala-Phe-Lys*3-PyrS2-3Thi-BztA-GlnR*3-Ala- |
| | NH2 |
| I-1141 | Ac-Ser-S5-Ala-Asp-Npg-B5-Asp-3COOHF-Aib-Ala-Phe-Lys*3-PyrS2-3Thi-BztA-GlnR*3-Ala- |
| | NH2 |
| I-1142 | Ac-Ala-S5-Ala-Asp-Npg-B5-Asp-3COOHF-Aib-Ala-Phe-Lys*3-PyrS2-3Thi-BztA-GlnR*3-Ala- |
| | NH2 |
| I-1143 | Ac-Ala-S5-Ala-Asp-Npg-B5-Asp-3COOHF-Aib-Ala-Phe-Lys*3-PyrS2-3Thi-BztA-GlnR*3-Ala- |
| | NH2 |
| I-1144 | Ac-S5-Ser-Asp-Npg-B5-Asp-3COOHF-Aib-Ala-Phe-Lys*3-PyrS2-3Thi-BztA-GlnR*3-Ala-NH2 |
| I-1145 | Ac-S5-Val-Asp-Npg-B5-Asp-3COOHF-Aib-Ala-Phe-Lys*3-PyrS2-3Thi-BztA-GlnR*3-Ala-NH2 |
| I-1146 | Ac-S5-Leu-Asp-Npg-B5-Asp-3COOHF-Aib-Ala-Phe-Lys*3-PyrS2-3Thi-BztA-GlnR*3-Ala-NH2 |
| I-1147 | Ac-S5-Thr-Asp-Npg-B5-Asp-3COOHF-Aib-Ala-Phe-Lys*3-PyrS2-3Thi-BztA-GlnR*3-Ala-NH2 |
| I-1148 | Ac-S5-Phe-Asp-Npg-B5-Asp-3COOHF-Aib-Ala-Phe-Lys*3-PyrS2-3Thi-BztA-GlnR*3-Ala-NH2 |
| I-1149 | Ac-Pro-S5-Ala-Asp-Npg-B5-Asp-3COOHF-Aib-Ala-Phe-Lys*3-PyrS2-3Thi-BztA-GlnR*3-Ala- |
| | NH2 |
| I-1150 | Ac-Ser-S5-Ala-Asp-Npg-B5-Asp-3COOHF-Aib-Ala-Phe-Lys*3-PyrS2-3Thi-BztA-GlnR*3-Ala- |
| | NH2 |
| I-1151 | Ac-Ala-S5-Ala-Asp-Npg-B5-Asp-3COOHF-Aib-Ala-Phe-Lys*3-PyrS2-3Thi-BztA-GlnR*3-Ala- |
| | NH2 |
| I-1152 | Ac-PL3-Val-Npg-B5-Asp-3COOHF-Aib-Ala-Phe-Lys*3-PyrS2-3Thi-BztA-GlnR*3-Ala-NH2 |
| I-1153 | Ac-PL3-Npg-Npg-B5-Asp-3COOHF-Aib-Ala-Phe-Lys*3-PyrS2-3Thi-BztA-GlnR*3-Ala-NH2 |
| I-1154 | Ac-PL3-BztA-Npg-B5-Asp-3COOHF-Aib-Ala-Phe-Lys*3-PyrS2-3Thi-BztA-GlnR*3-Ala-NH2 |
| I-1155 | Ac-PL3-Asp-Npg-B5-Asp-3COOHF-Aib-Ala-Phe-Lys*3-PyrS2-3Thi-BztA-GlnR*3-Ala-Ala-Arg- |
| | Ala-Ala-Ala-Ala-NH2 |
| I-1156 | Ac-PL3-Asp-Npg-B5-Asp-3COOHF-Aib-Ala-Phe-Lys*3-PyrS2-3Thi-BztA-GlnR*3-Ala-Arg-Ala- |
| | Ala-Ala-Arg-Ala-NH2 |
| I-1157 | Ac-PL3-Asp-Npg-B5-Asp-3COOHF-Aib-Ala-Phe-Lys*3-PyrS2-3Thi-BztA-GlnR*3-Ala-Ala-Arg- |
| | Ala-Ala-Ala-Arg-NH2 |
| I-1158 | Ac-PL3-Asp-Npg-B5-Asp-3COOHF-Aib-Ala-Phe-Lys*3-PyrS2-3Thi-BztA-GlnR*3-Ala-Ala-Lys- |
| | Ala-Ala-Ala-Lys-NH2 |
| I-1159 | Ac-PL3-Asp-Npg-B5-Asp-3COOHF-Aib-Ala-Phe-Lys*3-PyrS2-3Thi-BztA-GlnR*3-Ala-Ala- |
| | GlnR**3-Ala-Ala-Ala-Lys**3-NH2 |
| I-1160 | Ac-PL3-Asp-Npg-B5-Asp-3COOHF-Aib-Ala-Phe-Lys*3-PyrS2-3Thi-BztA-GlnR*3-Ala-Ala-Ala- |
| | GlnR**3-Ala-Ala-Ala-Lys**3-NH2 |
| I-1161 | Ac-PL3-Asp-Npg-B5-Asp-3COOHF-Aib-Ala-Phe-Lys*3-PyrS2-c6Phe-BztA-GlnR*3-Ala-NH2 |
| I-1162 | Ac-PL3-Asn-Npg-B5-Asp-3COOHF-Aib-Ala-Phe-Lys*3-PyrS2-3Thi-BztA-GlnR*3-NH2 |
| I-1163 | Ac-PL3-Asn-DipA-B5-Asp-3COOHF-Aib-Ala-Phe-Lys*3-PyrS2-3Thi-BztA-GlnR*3-NH2 |
| I-1164 | Ac-PL3-Asn-DipA-B5-Asp-3COOHF-Aib-Ala-Phe-Lys*3-PyrS2-3Thi-BztA-GlnR*3-Ala-NH2 |
| I-1165 | Ac-PL3-Asn-Ile-B5-Asp-3COOHF-Aib-Ala-Phe-Lys*3-PyrS2-3Thi-BztA-GlnR*3-NH2 |
| I-1166 | Ac-PL3-Asn-Ile-B5-Asp-3COOHF-Aib-Ala-Phe-Lys*3-PyrS2-3Thi-BztA-GlnR*3-NH2 |
| I-1167 | Ac-PL3-Asn-Ile-B5-Asp-3COOHF-Aib-Ala-Phe-Lys*3-PyrS2-3Thi-BztA-GlnR*3-Ala-NH2 |
| I-1168 | Ac-PL3-Asn-Ile-B5-Asp-3COOHF-Aib-Ala-Phe-Lys*3-PyrS2-3Thi-BztA-GlnR*3-Ala-NH2 |
| I-1169 | Ac-PL3-Asn-Ile-B5-Asp-3COOHF-Aib-Ala-Phe-Lys*3-PyrS2-3Thi-BztA-GlnR*3-Ser-NH2 |
| I-1170 | Ac-PL3-Asn-Ile-B5-Asp-3COOHF-Aib-Ala-Phe-Lys*3-PyrS2-3Thi-BztA-GlnR*3-Ser-NH2 |
| I-1171 | Ac-PL3-Asn-Npg-B5-Asp-3COOHF-Aib-Ala-Phe-Lys*3-PyrS2-Phe-34ClF-GlnR*3-NH2 |
| I-1172 | Ac-PL3-Asn-Npg-B5-Asp-3COOHF-Aib-Ala-Phe-Lys*3-PyrS2-Phe-34ClF-GlnR*3-NH2 |
| I-1173 | Ac-PL3-Asn-Npg-B5-Asp-3COOHF-Aib-Ala-Phe-Lys*3-PyrS2-Phe-34ClF-GlnR*3-Ala-NH2 |
| I-1174 | Ac-PL3-Asn-Npg-B5-Asp-3COOHF-Aib-Ala-Phe-Lys*3-PyrS2-Phe-34ClF-GlnR*3-Ala-NH2 |
| I-1175 | Ac-PL3-Asn-DipA-B5-Asp-3COOHF-Aib-Ala-Phe-Lys*3-PyrS2-Phe-34ClF-GlnR*3-NH2 |
| I-1176 | Ac-PL3-Asn-DipA-B5-Asp-3COOHF-Aib-Ala-Phe-Lys*3-PyrS2-Phe-34ClF-GlnR*3-NH2 |
| I-1177 | Ac-PL3-Asn-DipA-B5-Asp-3COOHF-Aib-Ala-Phe-Lys*3-PyrS2-Phe-34ClF-GlnR*3-Ala-NH2 |
| I-1178 | Ac-PL3-Asn-Ile-B5-Asp-3COOHF-Aib-Ala-Phe-Lys*3-PyrS2-Phe-34ClF-GlnR*3-NH2 |
| I-1179 | Ac-PL3-Asn-Ile-B5-Asp-3COOHF-Aib-Ala-Phe-Lys*3-PyrS2-Phe-34ClF-GlnR*3-NH2 |
| I-1180 | Ac-PL3-Asn-Ile-B5-Asp-3COOHF-Aib-Ala-Phe-Lys*3-PyrS2-Phe-34ClF-GlnR*3-Ala-NH2 |
| I-1181 | Ac-PL3-Asp-Npg-B5-Asp-3COOHF-Aib-Ala-Phe-Lys*3-PyrS2-3Thi-BztA-GlnR*3-[mPEG4]Lys- |
| | NH2 |
| I-1182 | Ac-PL3-Asp-Npg-B5-Asp-3COOHF-Aib-Ala-Phe-Lys*3-PyrS2-3Thi-BztA-GlnR*3-[mPEG8]Lys- |
| | NH2 |
| I-1183 | Ac-PL3-Asp-Npg-B5-Asp-3COOHF-Aib-Ala-Phe-Lys*3-PyrS2-3Thi-BztA-GlnR*3- |
| | [mPEG16]Lys-NH2 |
| I-1184 | mPEG4-PL3-Asp-Npg-B5-Asp-3COOHF-Aib-Ala-Phe-Lys*3-PyrS2-3Thi-BztA-GlnR*3-Ala-NH2 |
| I-1185 | mPEG8-PL3-Asp-Npg-B5-Asp-3COOHF-Aib-Ala-Phe-Lys*3-PyrS2-3Thi-BztA-GlnR*3-Ala-NH2 |
| I-1186 | mPEG16-PL3-Asp-Npg-B5-Asp-3COOHF-Aib-Ala-Phe-Lys*3-PyrS2-3Thi-BztA-GlnR*3-Ala- |
| | NH2 |
| I-1187 | mPEG24-PL3-Asp-Npg-B5-Asp-3COOHF-Aib-Ala-Phe-Lys*3-PyrS2-3Thi-BztA-GlnR*3-Ala- |
| | NH2 |
| I-1188 | Ac-PL3-Asp-Npg-B5-Asp-3BOH2F-Aib-Ala-Phe-Lys*3-PyrS2-3Thi-BztA-GlnR*3-Ala-NH2 |
| I-1189 | Ac-PL3-Asp-Npg-B5-Asp-4BOH2F-Aib-Ala-Phe-Lys*3-PyrS2-3Thi-BztA-GlnR*3-Ala-NH2 |
| I-1190 | Ac-PL3-Asp-Npg-B5-Asp-4BOH2F-Aib-Ala-Phe-Lys*3-PyrS2-3Thi-BztA-GlnR*3-Ala-NH2 |
| I-1191 | Ac-S5-Ala-Glu-Npg-B5-Asp-3COOHF-Aib-Ala-Phe-Lys*3-PyrS2-3Thi-BztA-GlnR*3-Ala-NH2 |
| I-1192 | Ac-S5-Ala-Glu-Npg-B5-Asp-3COOHF-Aib-Ala-Phe-Lys*3-PyrS2-3Thi-BztA-GlnR*3-Ala-NH2 |
| I-1193 | Ac-S5-Ala-Asn-Npg-B5-Asp-3COOHF-Aib-Ala-Phe-Lys*3-PyrS2-3Thi-BztA-GlnR*3-Ala-NH2 |
| I-1194 | Ac-S5-Ala-Asn-Npg-B5-Asp-3COOHF-Aib-Ala-Phe-Lys*3-PyrS2-3Thi-BztA-GlnR*3-Ala-NH2 |
| I-1195 | Ac-S5-Ala-Ser-Npg-B5-Asp-3COOHF-Aib-Ala-Phe-Lys*3-PyrS2-3Thi-BztA-GlnR*3-Ala-NH2 |
| I-1196 | Ac-S5-Ala-Ser-Npg-B5-Asp-3COOHF-Aib-Ala-Phe-Lys*3-PyrS2-3Thi-BztA-GlnR*3-Ala-NH2 |
| I-1197 | Ac-S5-Ala-Hse-Npg-B5-Asp-3COOHF-Aib-Ala-Phe-Lys*3-PyrS2-3Thi-BztA-GlnR*3-Ala-NH2 |
| I-1198 | Ac-S5-Ala-Hse-Npg-B5-Asp-3COOHF-Aib-Ala-Phe-Lys*3-PyrS2-3Thi-BztA-GlnR*3-Ala-NH2 |
| I-1199 | Ac-S5-Ala-Asp-Npg-B5-Glu-3COOHF-Aib-Ala-Phe-Lys*3-PyrS2-3Thi-BztA-GlnR*3-Ala-NH2 |
| I-1200 | Ac-S5-Ala-Asp-Npg-B5-Glu-3COOHF-Aib-Ala-Phe-Lys*3-PyrS2-3Thi-BztA-GlnR*3-Ala-NH2 |
| I-1201 | Ac-S5-Ala-Asp-Npg-B5-Asn-3COOHF-Aib-Ala-Phe-Lys*3-PyrS2-3Thi-BztA-GlnR*3-Ala-NH2 |
| I-1202 | Ac-S5-Ala-Asp-Npg-B5-Asn-3COOHF-Aib-Ala-Phe-Lys*3-PyrS2-3Thi-BztA-GlnR*3-Ala-NH2 |
| I-1203 | Ac-S5-Ala-Asp-Npg-B5-Ser-3COOHF-Aib-Ala-Phe-Lys*3-PyrS2-3Thi-BztA-GlnR*3-Ala-NH2 |
| I-1204 | Ac-S5-Ala-Asp-Npg-B5-Ser-3COOHF-Aib-Ala-Phe-Lys*3-PyrS2-3Thi-BztA-GlnR*3-Ala-NH2 |
| I-1205 | Ac-S5-Ala-Asp-Npg-B5-Hse-3COOHF-Aib-Ala-Phe-Lys*3-PyrS2-3Thi-BztA-GlnR*3-Ala-NH2 |
| I-1206 | Ac-S5-Ala-Asp-Npg-B5-Hse-3COOHF-Aib-Ala-Phe-Lys*3-PyrS2-3Thi-BztA-GlnR*3-Ala-NH2 |
| I-1207 | Ac-S5-Ala-Glu-Npg-B5-Glu-3COOHF-Aib-Ala-Phe-Lys*3-PyrS2-3Thi-BztA-GlnR*3-Ala-NH2 |
| I-1208 | Ac-S5-Ala-Glu-Npg-B5-Glu-3COOHF-Aib-Ala-Phe-Lys*3-PyrS2-3Thi-BztA-GlnR*3-Ala-NH2 |
| I-1209 | Ac-S5-Glu-Glu-Npg-B5-Asp-3COOHF-Aib-Ala-Phe-Lys*3-PyrS2-3Thi-BztA-GlnR*3-Ala-NH2 |
| I-1210 | Ac-S5-Glu-Glu-Npg-B5-Asp-3COOHF-Aib-Ala-Phe-Lys*3-PyrS2-3Thi-BztA-GlnR*3-Ala-NH2 |
| I-1211 | Ac-S5-Glu-Asp-Npg-B5-Glu-3COOHF-Aib-Ala-Phe-Lys*3-PyrS2-3Thi-BztA-GlnR*3-Ala-NH2 |
| I-1212 | Ac-S5-Glu-Asp-Npg-B5-Glu-3COOHF-Aib-Ala-Phe-Lys*3-PyrS2-3Thi-BztA-GlnR*3-Ala-NH2 |
| I-1213 | Ac-PL3-Asp-Npg-B5-Asp-3COOHF-Ala-Ala-Phe-Leu-[Red][Gly]Dap-3thi-BztA-Ala-GlnR-NH2 |
| I-1214 | Ac-PL3-Asp-Npg-B5-Asp-3COOHF-Ala-Ala-Phe-Leu-[Red][NHPent]Dap-3thi-BztA-Ala-GlnR- |
| | NH2 |
| I-1215 | Ac-PL3-Asp-Npg-B5-Asp-3COOHF-Ala-Ala-Phe-Leu-[SBut][CH2CH2NH]Dap-3thi-BztA-Ala- |
| | GlnR-NH2 |
| I-1216 | Ac-PL3-Asp-Npg-B5-Asp-3COOHF-Ala-Ala-Phe-Leu-[SBut][CH2CH2CH2NH]Dap-3thi-BztA- |
| | Ala-GlnR-NH2 |
| I-1217 | Ac-S5-Ala-Glu-Npg-B5-Asp-3COOHF-Aib-Ala-Phe-Lys*3-PyrS2-3Thi-BztA-GlnR*3-Ala-NH2 |
| I-1218 | Ac-S5-Ala-Asn-Npg-B5-Asp-3COOHF-Aib-Ala-Phe-Lys*3-PyrS2-3Thi-BztA-GlnR*3-Ala-NH2 |
| I-1219 | Ac-S5-Ala-Ser-Npg-B5-Asp-3COOHF-Aib-Ala-Phe-Lys*3-PyrS2-3Thi-BztA-GlnR*3-Ala-NH2 |
| I-1220 | Ac-S5-Ala-Hse-Npg-B5-Asp-3COOHF-Aib-Ala-Phe-Lys*3-PyrS2-3Thi-BztA-GlnR*3-Ala-NH2 |
| I-1221 | Ac-S5-Ala-Asp-Npg-B5-Glu-3COOHF-Aib-Ala-Phe-Lys*3-PyrS2-3Thi-BztA-GlnR*3-Ala-NH2 |
| I-1222 | Ac-S5-Ala-Asp-Npg-B5-Asn-3COOHF-Aib-Ala-Phe-Lys*3-PyrS2-3Thi-BztA-GlnR*3-Ala-NH2 |
| I-1223 | Ac-S5-Ala-Asp-Npg-B5-Ser-3COOHF-Aib-Ala-Phe-Lys*3-PyrS2-3Thi-BztA-GlnR*3-Ala-NH2 |
| I-1224 | Ac-S5-Ala-Asp-Npg-B5-Hse-3COOHF-Aib-Ala-Phe-Lys*3-PyrS2-3Thi-BztA-GlnR*3-Ala-NH2 |
| I-1225 | Ac-S5-Ala-Glu-Npg-B5-Glu-3COOHF-Aib-Ala-Phe-Lys*3-PyrS2-3Thi-BztA-GlnR*3-Ala-NH2 |
| I-1226 | Ac-S5-Glu-Glu-Npg-B5-Asp-3COOHF-Aib-Ala-Phe-Lys*3-PyrS2-3Thi-BztA-GlnR*3-Ala-NH2 |
| I-1227 | Ac-S5-Glu-Asp-Npg-B5-Glu-3COOHF-Aib-Ala-Phe-Lys*3-PyrS2-3Thi-BztA-GlnR*3-Ala-NH2 |
| I-1228 | Ac-S5-Glu-Glu-Npg-B5-Glu-3COOHF-Aib-Ala-Phe-Lys*3-PyrS2-3Thi-BztA-GlnR*3-Ala-NH2 |
| I-1229 | Ac-S5-Ala-Asp-Npg-B5-Asp-3COOHF-Aib-Ala-Phe-Lys*3-PyrS2-Phe-34ClF-GlnR*3-Ala-NH2 |
| I-1230 | Ac-S5-Ala-Asp-Npg-B5-Asp-3COOHF-Aib-Ala-Phe-Lys*3-PyrS2-Phe-34ClF-GlnR*3-NH2 |
| I-1231 | Ac-S5-Ala-Asp-Npg-B5-Asp-3COOHF-Aib-Ala-Phe-Lys*3-PyrS2-3Thi-34ClF-GlnR*3-Ala-NH2 |
| I-1232 | Ac-S5-Ala-Asp-Npg-B5-Asp-3COOHF-Aib-Ala-Phe-Lys*3-PyrS2-3Thi-34ClF-GlnR*3-NH2 |
| I-1233 | Ac-S5-Ala-Asp-Ile-B5-Asp-3COOHF-Aib-Ala-Phe-Lys*3-PyrS2-Phe-34ClF-GlnR*3-Ala-NH2 |
| I-1234 | Ac-S5-Ala-Asp-Ile-B5-Asp-3COOHF-Aib-Ala-Phe-Lys*3-PyrS2-Phe-34ClF-GlnR*3-NH2 |
| I-1235 | Ac-S5-Ala-Asp-Ala-B5-Asp-3COOHF-Aib-Ala-Phe-Lys*3-PyrS2-Phe-34ClF-GlnR*3-Ala-NH2 |
| I-1236 | Ac-S5-Ala-Asp-Ala-B5-Asp-3COOHF-Aib-Ala-Phe-Lys*3-PyrS2-Phe-34ClF-GlnR*3-NH2 |
| I-1237 | Ac-S5-Ala-Asp-Phe-B5-Asp-3COOHF-Aib-Ala-Phe-Lys*3-PyrS2-Phe-34ClF-GlnR*3-Ala-NH2 |
| I-1238 | Ac-S5-Ala-Asp-Phe-B5-Asp-3COOHF-Aib-Ala-Phe-Lys*3-PyrS2-Phe-34ClF-GlnR*3-NH2 |
| I-1239 | Ac-S5-Ala-Asp-Ile-B5-Asp-3COOHF-Ala-Ala-Phe-Lys*3-PyrS2-Phe-34ClF-GlnR*3-Ala-NH2 |
| I-1240 | Ac-S5-Ala-Asp-Ile-B5-Asp-3COOHF-Ala-Ala-Phe-Lys*3-PyrS2-Phe-34ClF-GlnR*3-NH2 |
| I-1241 | Ac-PL3-Asp-Ile-B5-Asp-3COOHF-[isovaleryl]Acp-Ala-Phe-TriAzLys*3-PyrS2-Phe-34ClF- |
| | sAla*3-NH2 |
| I-1242 | Ac-PL3-Asp-Npg-B5-Asp-3COOHF-Aib-Ala-Phe-Lys*3-PyrS2-Phe-BztA-GlnR*3-NH2 |
| I-1243 | Ac-PL3-Asp-Npg-B5-Asp-3COOHF-Ala-Ala-Phe-Lys*3-PyrS2-Phe-BztA-GlnR*3-NH2 |
| I-1244 | Ac-PL3-Asp-Npg-B5-Asp-3COOHF-Ala-Ala-Phe-Lys*3-PyrS2-Phe-BztA-GlnR*3-Ala-NH2 |
| I-1245 | Ac-PL3-Asp-Npg-B5-Asp-3COOHF-Aib-Ala-Phe-Lys*3-PyrS2-Phe-7FBztA-GlnR*3-NH2 |
| I-1246 | Ac-PL3-Asp-Npg-B5-Asp-3COOHF-Aib-Ala-Phe-Lys*3-PyrS2-Phe-7FBztA-GlnR*3-NH2 |
| I-1247 | Ac-PL3-Asp-Npg-B5-Asp-3COOHF-Aib-Ala-Phe-Lys*3-PyrS2-Phe-7FBztA-GlnR*3-Ala-NH2 |
| I-1248 | Ac-PL3-Asp-Npg-B5-Asp-3COOHF-Aib-Ala-Phe-Lys*3-PyrS2-Phe-7ClBztA-GlnR*3-NH2 |
| I-1249 | Ac-PL3-Asp-Npg-B5-Asp-3COOHF-Aib-Ala-Phe-Lys*3-PyrS2-Phe-7ClBztA-GlnR*3-Ala-NH2 |
| I-1250 | Ac-PL3-Asp-Npg-B5-Asp-3COOHF-Aib-Ala-Phe-Lys*3-PyrS2-Phe-7MeBztA-GlnR*3-NH2 |
| I-1251 | Ac-PL3-Asp-Npg-B5-Asp-3COOHF-Aib-Ala-Phe-Lys*3-PyrS2-Phe-7MeBztA-GlnR*3-Ala-NH2 |
| I-1252 | Ac-PL3-Asp-Ile-B5-Asp-3COOHF-Aib-Ala-Phe-Lys*3-PyrS2-Phe-34ClF-GlnR*3-Val-Glu-Ala- |
| | NH2 |
| I-1253 | Ac-PL3-Asp-Ile-B5-Asp-3COOHF-Aib-Ala-Phe-Lys*3-PyrS2-Phe-34ClF-GlnR*3-Val-Glu-Ala- |
| | NH2 |
| I-1254 | Ac-PL3-Asp-Ile-B5-Asp-3COOHF-Aib-Ala-Phe-Lys*3-PyrS2-Phe-34ClF-GlnR*3-Val-Glu-Leu- |
| | NH2 |
| I-1255 | Ac-PL3-Asp-Ile-B5-Asp-3COOHF-Aib-Ala-Phe-Lys*3-PyrS2-Phe-34ClF-GlnR*3-Val-Glu-Leu- |
| | NH2 |
| I-1256 | Ac-PL3-Asp-Ile-B5-Asp-3COOHF-Aib-Ala-Phe-Lys*3-PyrS2-Phe-34ClF-GlnR*3-Val-Thr-Ala- |
| | NH2 |
| I-1257 | Ac-PL3-Asp-Ile-B5-Asp-3COOHF-Aib-Ala-Phe-Lys*3-PyrS2-Phe-34ClF-GlnR*3-Val-Thr-Ala- |
| | NH2 |
| I-1258 | Ac-PL3-Asp-Ile-B5-Asp-3COOHF-CyLeu-Ala-Phe-Lys*3-PyrS2-Phe-34ClF-GlnR*3-Val-Glu-Ala- |
| | NH2 |
| I-1259 | Ac-PL3-Asp-Ile-B5-Asp-3COOHF-CyLeu-Ala-Phe-Lys*3-PyrS2-Phe-34ClF-GlnR*3-Val-Glu-Ala- |
| | NH2 |
| I-1260 | Ac-PL3-Asp-Ile-B5-Asp-3COOHF-CyLeu-Ala-Phe-Lys*3-PyrS2-Phe-34ClF-GlnR*3-Val-Glu-Leu- |
| | NH2 |
| I-1261 | Ac-PL3-Asp-Ile-B5-Asp-3COOHF-CyLeu-Ala-Phe-Lys*3-PyrS2-Phe-34ClF-GlnR*3-Val-Glu-Leu- |
| | NH2 |
| I-1262 | Ac-PL3-Asp-Ile-B5-Asp-3COOHF-CyLeu-Ala-Phe-Lys*3-PyrS2-Phe-34ClF-GlnR*3-Val-Thr-Ala- |
| | NH2 |
| I-1263 | Ac-PL3-Asp-Ile-B5-Asp-3COOHF-Aib-Ala-Phe-Lys*3-PyrS2-3Thi-34ClF-GlnR*3-Val-Glu-Ala- |
| | NH2 |
| I-1264 | Ac-PL3-Asp-Ile-B5-Asp-3COOHF-Aib-Ala-Phe-Lys*3-PyrS2-3Thi-34ClF-GlnR*3-Val-Glu-Leu- |
| | NH2 |
| I-1265 | Ac-PL3-Asp-Ile-B5-Asp-3COOHF-Aib-Ala-Phe-Lys*3-PyrS2-3Thi-34ClF-GlnR*3-Val-Thr-Ala- |
| | NH2 |
| I-1266 | Ac-PL3-Asp-Ile-B5-Asp-3COOHF-CyLeu-Ala-Phe-Lys*3-PyrS2-3Thi-34ClF-GlnR*3-Val-Glu- |
| | Ala-NH2 |
| I-1267 | Ac-PL3-Asp-Ile-B5-Asp-3COOHF-CyLeu-Ala-Phe-Lys*3-PyrS2-3Thi-34ClF-GlnR*3-Val-Glu- |
| | Leu-NH2 |
| I-1268 | Ac-PL3-Asp-Ile-B5-Asp-3COOHF-CyLeu-Ala-Phe-Lys*3-PyrS2-3Thi-34ClF-GlnR*3-Val-Thr- |
| | Ala-NH2 |
| I-1269 | Ac-PL3-Asp-Npg-B5-Asp-3COOHF-Aib-Ala-Phe-[3_3-biPh]hCys-PyrS2-3Thi-BztA-Cys-Ala-NH2 |
| I-1270 | Ac-PL3-Asp-Npg-B5-Asp-3COOHF-Aib-Ala-Phe-[2_6-naph]hCys-PyrS2-3Thi-BztA-Cys-Ala- |
| | NH2 |
| I-1271 | Ac-PL3-Asp-Npg-B5-Asp-3COOHF-Aib-Ala-Phe-[mPyr]Cys-PyrS2-3Thi-BztA-Cys-Ala-NH2 |
| I-1272 | Ac-PL3-Asp-Npg-B5-Asp-3COOHF-Aib-Ala-Phe-[mXyl]Cys-PyrS2-3Thi-BztA-Cys-Ala-NH2 |
| I-1273 | Ac-PL3-Asp-Npg-B5-Asp-3COOHF-Aib-Ala-Phe-[mPyr]hCys-PyrS2-3Thi-BztA-Cys-Ala-NH2 |
| I-1274 | Ac-PL3-Asp-Npg-B5-Asp-3COOHF-Aib-Ala-Phe-[C3]Cys-PyrS2-3Thi-BztA-Cys-Ala-NH2 |
| I-1275 | Ac-PL3-Asp-Npg-B5-Asp-3COOHF-Aib-Ala-Phe-[Red]Cys-PyrS2-3Thi-BztA-Cys-Ala-NH2 |
| I-1276 | Ac-PL3-Asp-Npg-B5-Asp-3COOHF-Aib-Ala-Phe-[33Oxe]hCys-PyrS2-3Thi-BztA-Cys-Ala-NH2 |
| I-1277 | Ac-PL3-Asp-Npg-B5-Asp-3COOHF-Aib-Ala-Phe-[33Oxe]Cys-PyrS2-3Thi-BztA-Cys-Ala-NH2 |
| I-1278 | Ac-PL3-Asp-Npg-B5-Asp-3COOHF-Aib-Ala-Phe-[IsoE]Cys-PyrS2-3Thi-BztA-Cys-Ala-NH2 |
| I-1279 | Ac-PL3-Asp-Npg-B5-Asp-3COOHF-Aib-Ala-Phe-[C3]hCys-PyrS2-3Thi-BztA-Cys-Ala-NH2 |
| I-1280 | Ac-PL3-Asp-Npg-B5-Asp-3COOHF-Aib-Ala-Phe-[Red]hCys-PyrS2-3Thi-BztA-Cys-Ala-NH2 |
| I-1281 | Ac-PL3-Asp-Npg-B5-Asp-3COOHF-Aib-Ala-Phe-[IsoE]hCys-PyrS2-3Thi-BztA-Cys-Ala-NH2 |
| I-1282 | Ac-PL3-Asp-Npg-B5-Asp-3COOHF-Aib-Ala-Phe-[13Ac]Cys-PyrS2-3Thi-BztA-Cys-Ala-NH2 |
| I-1283 | Ac-PL3-Asp-Npg-B5-Asp-3COOHF-Aib-Ala-Phe-[13Ac]hCys-PyrS2-3Thi-BztA-Cys-Ala-NH2 |
| I-1284 | Ac-Ala-Ala-S5-Ala-Asp-Npg-B5-Asp-3COOHF-Aib-Ala-Phe-Lys*3-PyrS2-3Thi-BztA-GlnR*3- |
| | Ala |
| I-1285 | Ac-Asp-Ala-S5-Ala-Asp-Npg-B5-Asp-3COOHF-Aib-Ala-Phe-Lys*3-PyrS2-3Thi-BztA-GlnR*3- |
| | Ala |
| I-1286 | Ac-Pro-Ala-S5-Ala-Asp-Npg-B5-Asp-3COOHF-Aib-Ala-Phe-Lys*3-PyrS2-3Thi-BztA-GlnR*3- |
| | Ala |
| I-1287 | Ac-Ala-Ala-S5-Ser-Asp-Npg-B5-Asp-3COOHF-Aib-Ala-Phe-Lys*3-PyrS2-3Thi-BztA-GlnR*3-Ala |
| I-1288 | Ac-Asp-Ala-S5-Ser-Asp-Npg-B5-Asp-3COOHF-Aib-Ala-Phe-Lys*3-PyrS2-3Thi-BztA-GlnR*3- |
| | Ala |
| I-1289 | Ac-Pro-Ala-S5-Ser-Asp-Npg-B5-Asp-3COOHF-Aib-Ala-Phe-Lys*3-PyrS2-3Thi-BztA-GlnR*3-Ala |
| I-1290 | Ac-Ala-Ala-S5-Leu-Asp-Npg-B5-Asp-3COOHF-Aib-Ala-Phe-Lys*3-PyrS2-3Thi-BztA-GlnR*3- |
| | Ala |
| I-1291 | Ac-Asp-Ala-S5-Leu-Asp-Npg-B5-Asp-3COOHF-Aib-Ala-Phe-Lys*3-PyrS2-3Thi-BztA-GlnR*3- |
| | Ala |
| I-1292 | Ac-Pro-Ala-S5-Leu-Asp-Npg-B5-Asp-3COOHF-Aib-Ala-Phe-Lys*3-PyrS2-3Thi-BztA-GlnR*3- |
| | Ala |
| I-1293 | Ac-Ala-Ser-S5-Ala-Asp-Npg-B5-Asp-3COOHF-Aib-Ala-Phe-Lys*3-PyrS2-3Thi-BztA-GlnR*3-Ala |
| I-1294 | Ac-Asp-Ser-S5-Ala-Asp-Npg-B5-Asp-3COOHF-Aib-Ala-Phe-Lys*3-PyrS2-3Thi-BztA-GlnR*3- |
| | Ala |
| I-1295 | Ac-Pro-Ser-S5-Ala-Asp-Npg-B5-Asp-3COOHF-Aib-Ala-Phe-Lys*3-PyrS2-3Thi-BztA-GlnR*3-Ala |
| I-1296 | Ac-S5-Leu-Asp-Ile-B5-Asp-3COOHF-Aib-Ala-Phe-Lys*3-PyrS2-Phe-34ClF-GlnR*3-NH2 |
| I-1297 | Ac-S5-Ala-Asp-Npg-B5-Ala-Asp-3COOHF-Aib-Ala-Phe-[4Abu]DapAc7-Leu-3Thi-BztA-GlnR*3- |
| | Ala-NH2 |
| I-1298 | Ac-S6-Ala-Asp-Npg-B5-Ala-Asp-3COOHF-Aib-Ala-Phe-[4Abu]DapAc7-Leu-3Thi-BztA-GlnR*3- |
| | Ala-NH2 |
| I-1299 | Ac-S5-Ala-Asp-Npg-B5-Asp-3COOHF-Aib-Ala-Phe-Leu-[4Abu]DapAc7-3thi-BztA-Ala-GlnR*3- |
| | NH2 |
| I-1300 | Ac-S6-Ala-Asp-Npg-B5-Asp-3COOHF-Aib-Ala-Phe-Leu-[4Abu]DapAc7-3thi-BztA-Ala-GlnR*3- |
| | NH2 |
| I-1301 | Ac-PL3-AspSH-Npg-B5-Asp-3COOHF-Aib-Ala-Phe-Lys*3-PyrS2-3Thi-BztA-GlnR*3-Ala-NH2 |
| I-1302 | Ac-PL3-Asp-Npg-B5-AspSH-3COOHF-Aib-Ala-Phe-Lys*3-PyrS2-3Thi-BztA-GlnR*3-Ala-NH2 |
| I-1303 | Ac-PL3-AspSH-Npg-B5-AspSH-3COOHF-Aib-Ala-Phe-Lys*3-PyrS2-3Thi-BztA-GlnR*3-Ala- |
| | NH2 |
| I-1304 | Ac-PL3-Asp-Npg-B5-Asp-3COOHF-Aib-Ala-Phe-Lys*3-PyrS2-hhLeu-BztA-GlnR*3-Ala-NH2 |
| I-1305 | Ac-PL3-Asp-Npg-B5-Asp-3COOHF-Aib-Ala-Phe-Lys*3-PyrS2-hPhe-BztA-GlnR*3-Ala-NH2 |
| I-1306 | Ac-PL3-Asp-Npg-B5-Asp-3COOHF-Aib-Ala-Phe-Lys*3-PyrS2-hhSer-BztA-GlnR*3-Ala-NH2 |
| I-1307 | Ac-PL3-Asp-Npg-B5-Asp-3COOHF-Aib-Ala-Phe-Lys*3-PyrS2-hhLeu-34ClF-GlnR*3-Ala-NH2 |
| I-1308 | Ac-PL3-Asp-Npg-B5-Asp-3COOHF-Aib-Ala-Phe-Lys*3-PyrS2-hPhe-34ClF-GlnR*3-Ala-NH2 |
| I-1309 | Ac-PL3-Asp-Npg-B5-Asp-3COOHF-Aib-Ala-Phe-Lys*3-PyrS2-hhSer-34ClF-GlnR*3-Ala-NH2 |
| I-1310 | Ac-PL3-Asp-Ile-B5-Asp-3COOHF-Aib-Ala-Phe-Lys*3-PyrS2-hhLeu-BztA-GlnR*3-Ala-NH2 |
| I-1311 | Ac-PL3-Asp-Ile-B5-Asp-3COOHF-Aib-Ala-Phe-Lys*3-PyrS2-hPhe-BztA-GlnR*3-Ala-NH2 |
| I-1312 | Ac-PL3-Asp-Ile-B5-Asp-3COOHF-Aib-Ala-Phe-Lys*3-PyrS2-hPhe-BztA-GlnR*3-Ala-NH2 |
| I-1313 | Ac-PL3-Asp-Ile-B5-Asp-3COOHF-Aib-Ala-Phe-Lys*3-PyrS2-hhSer-BztA-GlnR*3-Ala-NH2 |
| I-1314 | Ac-PL3-Asp-Ile-B5-Asp-3COOHF-Aib-Ala-Phe-Lys*3-PyrS2-hhLeu-34ClF-GlnR*3-Ala-NH2 |
| I-1315 | Ac-PL3-Asp-Ile-B5-Asp-3COOHF-Aib-Ala-Phe-Lys*3-PyrS2-hPhe-34ClF-GlnR*3-Ala-NH2 |
| I-1316 | Ac-PL3-Asp-Ile-B5-Asp-3COOHF-Aib-Ala-Phe-Lys*3-PyrS2-hhSer-34ClF-GlnR*3-Ala-NH2 |
| I-1317 | Ac-PL3-Asp-Npg-B5-Asp-3COOHF-Aib-Ala-Phe-Lys*3-PyrS2-hCbA-BztA-GlnR*3-Ala-NH2 |
| I-1318 | Ac-PL3-Asp-Npg-B5-Asp-3COOHF-Aib-Ala-Phe-Lys*3-PyrS2-hCypA-BztA-GlnR*3-Ala-NH2 |
| I-1319 | Ac-PL3-Asp-Npg-B5-Asp-3COOHF-Aib-Ala-Phe-Lys*3-PyrS2-hCha-BztA-GlnR*3-Ala-NH2 |
| I-1320 | Ac-PL3-Asp-Npg-B5-Asp-3COOHF-Aib-Ala-Phe-Lys*3-PyrS2-hCbA-34ClF-GlnR*3-Ala-NH2 |
| I-1321 | Ac-PL3-Asp-Npg-B5-Asp-3COOHF-Aib-Ala-Phe-Lys*3-PyrS2-hCypA-34ClF-GlnR*3-Ala-NH2 |
| I-1322 | Ac-PL3-Asp-Npg-B5-Asp-3COOHF-Aib-Ala-Phe-Lys*3-PyrS2-hCha-34ClF-GlnR*3-Ala-NH2 |
| I-1323 | Ac-PL3-Asp-Ile-B5-Asp-3COOHF-Aib-Ala-Phe-Lys*3-PyrS2-hCbA-BztA-GlnR*3-Ala-NH2 |
| I-1324 | Ac-PL3-Asp-Ile-B5-Asp-3COOHF-Aib-Ala-Phe-Lys*3-PyrS2-hCypA-BztA-GlnR*3-Ala-NH2 |
| I-1325 | Ac-PL3-Asp-Ile-B5-Asp-3COOHF-Aib-Ala-Phe-Lys*3-PyrS2-hCha-BztA-GlnR*3-Ala-NH2 |
| I-1326 | Ac-PL3-Asp-Ile-B5-Asp-3COOHF-Aib-Ala-Phe-Lys*3-PyrS2-hCbA-34ClF-GlnR*3-Ala-NH2 |
| I-1327 | Ac-PL3-Asp-Ile-B5-Asp-3COOHF-Aib-Ala-Phe-Lys*3-PyrS2-hCypA-34ClF-GlnR*3-Ala-NH2 |
| I-1328 | Ac-PL3-Asp-Ile-B5-Asp-3COOHF-Aib-Ala-Phe-Lys*3-PyrS2-hCha-34ClF-GlnR*3-Ala-NH2 |
| I-1329 | Ac-S5-Ala-Asp-Npg-B5-Asp-Asp-Aib-Ala-Phe-Lys*3-PyrS2-3Thi-BztA-GlnR*3-Ala-NH2 |
| I-1330 | Ac-S5-Ala-Asp-Npg-B5-Glu-Asp-Aib-Ala-Phe-Lys*3-PyrS2-3Thi-BztA-GlnR*3-Ala-NH2 |
| I-1331 | Ac-S5-Ala-Asp-Npg-B5-TfeGA-Asp-Aib-Ala-Phe-Lys*3-PyrS2-3Thi-BztA-GlnR*3-Ala-NH2 |
| I-1332 | Ac-S5-Pro-Asp-Npg-B5-Asp-Asp-Aib-Ala-Phe-Lys*3-PyrS2-3Thi-BztA-GlnR*3-Ala-NH2 |
| I-1333 | Ac-S5-Pro-Asp-Npg-B5-Glu-Asp-Aib-Ala-Phe-Lys*3-PyrS2-3Thi-BztA-GlnR*3-Ala-NH2 |
| I-1334 | Ac-S5-Pro-Asp-Npg-B5-TfeGA-Asp-Aib-Ala-Phe-Lys*3-PyrS2-3Thi-BztA-GlnR*3-Ala-NH2 |
| I-1335 | Ac-S5-Ala-Asp-Ile-B5-Asp-2COOHF-Aib-Ala-Phe-Lys*3-PyrS2-Phe-34ClF-GlnR*3-NH2 |
| I-1336 | Ac-S5-Ala-Asp-Ile-B5-Asp-4COOHF-Aib-Ala-Phe-Lys*3-PyrS2-Phe-34ClF-GlnR*3-NH2 |
| I-1337 | Ac-S5-Ala-Asp-Ile-B5-Asp-Asp-Aib-Ala-Phe-Lys*3-PyrS2-Phe-34ClF-GlnR*3-NH2 |
| I-1338 | Ac-S5-Ala-Asp-Ile-B5-Asp-Glu-Aib-Ala-Phe-Lys*3-PyrS2-Phe-34ClF-GlnR*3-NH2 |
| I-1339 | Ac-S5-Ala-Asp-Ile-B5-Asp-Asn-Aib-Ala-Phe-Lys*3-PyrS2-Phe-34ClF-GlnR*3-NH2 |
| I-1340 | Ac-S5-Ala-Asp-Ile-B5-Asp-Gln-Aib-Ala-Phe-Lys*3-PyrS2-Phe-34ClF-GlnR*3-NH2 |
| I-1341 | Ac-S5-Ala-Asp-Ile-B5-Asp-Ser-Aib-Ala-Phe-Lys*3-PyrS2-Phe-34ClF-GlnR*3-NH2 |
| I-1342 | Ac-S5-Tle-Asp-Ile-B5-Asp-3COOHF-Aib-Ala-Phe-Lys*3-PyrS2-Phe-34ClF-GlnR*3-NH2 |
| I-1343 | Ac-S5-Val-Asp-Ile-B5-Asp-3COOHF-Aib-Ala-Phe-Lys*3-PyrS2-Phe-34ClF-GlnR*3-NH2 |
| I-1344 | Ac-S5-Ile-Asp-Ile-B5-Asp-3COOHF-Aib-Ala-Phe-Lys*3-PyrS2-Phe-34ClF-GlnR*3-NH2 |
| I-1345 | Ac-PL3-Asp-Npg-B5-Asp-3COOHF-Aib-Ala-Phe-Lys*3-PyrS2-hCbA-BztA-GlnR*3-Val-Glu-Ala- |
| | NH2 |
| I-1346 | Ac-PL3-Asp-Npg-B5-Asp-3COOHF-Aib-Ala-Phe-Lys*3-PyrS2-hCypA-BztA-GlnR*3-Val-Glu- |
| | Ala-NH2 |
| I-1347 | Ac-PL3-Asp-Npg-B5-Asp-3COOHF-Aib-Ala-Phe-Lys*3-PyrS2-hCha-BztA-GlnR*3-Val-Glu-Ala- |
| | NH2 |
| I-1348 | Ac-PL3-Asp-Npg-B5-Asp-3COOHF-Aib-Ala-Phe-Lys*3-PyrS2-hCbA-34ClF-GlnR*3-Val-Glu- |
| | Ala-NH2 |
| I-1349 | Ac-PL3-Asp-Npg-B5-Asp-3COOHF-Aib-Ala-Phe-Lys*3-PyrS2-hCypA-34ClF-GlnR*3-Val-Glu- |
| | Ala-NH2 |
| I-1350 | Ac-PL3-Asp-Npg-B5-Asp-3COOHF-Aib-Ala-Phe-Lys*3-PyrS2-hCha-34ClF-GlnR*3-Val-Glu-Ala- |
| | NH2 |
| I-1351 | Ac-PL3-Asp-Ile-B5-Asp-3COOHF-Aib-Ala-Phe-Lys*3-PyrS2-Phe-34ClF-GlnR*3-Thr-Glu-Ala- |
| | NH2 |
| I-1352 | Ac-PL3-Asp-Ile-B5-Asp-3COOHF-Aib-Ala-Phe-Lys*3-PyrS2-Phe-34ClF-GlnR*3-Ser-Glu-Ala- |
| | NH2 |
| I-1353 | Ac-PL3-Asp-Ile-B5-Asp-3COOHF-Aib-Ala-Phe-Lys*3-PyrS2-Phe-34ClF-GlnR*3-Thr-Ser-Ala- |
| | NH2 |
| I-1354 | Ac-PL3-Asp-Ile-B5-Asp-3COOHF-Aib-Ala-Phe-Lys*3-PyrS2-Phe-34ClF-GlnR*3-Ser-Ser-Ala- |
| | NH2 |
| I-1355 | Ac-PL3-Asp-Ile-B5-Asp-3COOHF-Aib-Ala-Phe-Lys*3-PyrS2-Phe-34ClF-GlnR*3-Thr-Lys-Ala- |
| | NH2 |
| I-1356 | Ac-PL3-Asp-Ile-B5-Asp-3COOHF-Aib-Ala-Phe-Lys*3-PyrS2-Phe-34ClF-GlnR*3-Ser-Lys-Ala- |
| | NH2 |
| I-1357 | Ac-PL3-Asp-Ile-B5-Asp-3COOHF-Aib-Ala-Phe-Lys*3-PyrS2-Phe-34ClF-GlnR*3-Thr-Glu-Leu- |
| | NH2 |
| I-1358 | Ac-PL3-Asp-Ile-B5-Asp-3COOHF-Aib-Ala-Phe-Lys*3-PyrS2-Phe-34ClF-GlnR*3-Ser-Glu-Leu- |
| | NH2 |
| I-1359 | Ac-PL3-Asp-Ile-B5-Asp-3COOHF-Aib-Ala-Phe-Lys*3-PyrS2-Phe-34ClF-GlnR*3-Thr-Ser-Leu- |
| | NH2 |
| I-1360 | Ac-PL3-Asp-Ile-B5-Asp-3COOHF-Aib-Ala-Phe-Lys*3-PyrS2-Phe-34ClF-GlnR*3-Ser-Ser-Leu- |
| | NH2 |
| I-1361 | Ac-PL3-Asp-Ile-B5-Asp-3COOHF-Aib-Ala-Phe-Lys*3-PyrS2-Phe-34ClF-GlnR*3-Thr-Lys-Leu- |
| | NH2 |
| I-1362 | Ac-PL3-Asp-Ile-B5-Asp-3COOHF-Aib-Ala-Phe-Lys*3-PyrS2-Phe-34ClF-GlnR*3-Ser-Lys-Leu- |
| | NH2 |
| I-1363 | Ac-PL3-Asp-Npg-B5-Asp-3COOHF-Aib-Ala-Phe-Leu-[4Abu]DapAc7-3thi-BztA-Ala-GlnR-NH2 |
| I-1364 | Ac-PL3-Asp-Npg-B5-Asp-3COOHF-Aib-Ala-Phe-Leu-[SBut][CH2CH2NH]Dap-3thi-BztA-Ala- |
| | GlnR-NH2 |
| I-1365 | Ac-PL3-Asp-Npg-B5-Asp-3COOHF-Aib-Ala-Phe-[m5Meb]Cys-PyrS2-3Thi-BztA-Cys-Ala-NH2 |
| I-1366 | Ac-PL3-Asp-Npg-B5-Asp-3COOHF-Aib-Ala-Phe-[m5Meb]hCys-PyrS2-3Thi-BztA-Cys-Ala-NH2 |
| I-1367 | Ac-PL3-Asp-Ile-B5-Asp-3COOHF-Aib-Ala-Phe-GlnR*3-PyrS2-Phe-34ClF-Lys*3-NH2 |
| I-1368 | Ac-PL3-Asp-Ile-B5-Asp-3COOHF-Aib-Ala-Phe-GlnR*3-PyrS2-Phe-34ClF-Lys*3-NH2 |
| I-1369 | Ac-PL3-Asp-Ile-B5-Asp-3COOHF-Aib-Ala-Phe-1MeK*3-PyrS2-Phe-34ClF-GlnR*3-NH2 |
| I-1370 | Ac-PL3-Asp-Ile-B5-Asp-3COOHF-Aib-Ala-Phe-GlnR*3-PyrS2-Phe-34ClF-1MeK*3-NH2 |
| I-1371 | Ac-PL3-Asp-Ile-B5-Asp-3COOHF-Aib-Ala-Phe-Lys*3-PyrS2-Phe-34ClF-hGlnR*3-NH2 |
| I-1372 | Ac-PL3-Asp-Ile-B5-Asp-3COOHF-Aib-Ala-Phe-hGlnR*3-PyrS2-Phe-34ClF-Lys*3-NH2 |
| I-1373 | Ac-PL3-Asp-Ile-B5-Asp-3COOHF-Aib-Ala-Phe-1MeK*3-PyrS2-Phe-34ClF-hGlnR*3-NH2 |
| I-1374 | Ac-PL3-Asp-Ile-B5-Asp-3COOHF-Aib-Ala-Phe-hGlnR*3-PyrS2-Phe-34ClF-1MeK*3-NH2 |
| I-1375 | Ac-PL3-Asp-Ile-B5-Asp-3COOHF-Aib-Ala-Phe-hGlnR*3-PyrS2-Phe-34ClF-1MeK*3-NH2 |
| I-1376 | Ac-PL3-Asp-Ile-B5-Asp-3COOHF-Aib-Ala-Phe-GlnR*3-PyrS2-Phe-34ClF-AsnEDA*3-NH2 |
| I-1377 | Ac-PL3-Asp-Ile-B5-Asp-3COOHF-Aib-Ala-Phe-GlnR*3-PyrS2-Phe-34ClF-AsnEDA*3-NH2 |
| I-1378 | Ac-PL3-Asp-Ile-B5-Asp-3COOHF-Aib-Ala-Phe-GlnR*3-PyrS2-Phe-34ClF-GlnEDA*3-NH2 |
| I-1379 | Ac-PL3-Asp-Ile-B5-Asp-3COOHF-Aib-Ala-Phe-GlnR*3-PyrS2-Phe-34ClF-AsnPpz*3-NH2 |
| I-1380 | Ac-PL3-Asp-Ile-B5-Asp-3COOHF-Aib-Ala-Phe-GlnR*3-PyrS2-Phe-34ClF-GlnPpz*3-NH2 |
| I-1381 | Ac-PL3-Asp-Ile-B5-Asp-3COOHF-Aib-Ala-Phe-GlnR3APyr*3-PyrS2-Phe-34ClF-GlnR*3-NH2 |
| I-1382 | Ac-PL3-Asp-Ile-B5-Asp-3COOHF-Aib-Ala-Phe-GlnR*3-PyrS2-Phe-34ClF-GlnR3APyr*3-NH2 |
| I-1383 | Ac-PL3-Asp-Ile-B5-Asp-3COOHF-Aib-Ala-Phe-GlnS3APyr*3-PyrS2-Phe-34ClF-GlnR*3-NH2 |
| I-1384 | Ac-PL3-Asp-Ile-B5-Asp-3COOHF-Aib-Ala-Phe-GlnS3APyr*3-PyrS2-Phe-34ClF-GlnR*3-NH2 |
| I-1385 | Ac-PL3-Asp-Ile-B5-Asp-3COOHF-Aib-Ala-Phe-GlnR*3-PyrS2-Phe-34ClF-GlnS3APyr*3-NH2 |
| I-1386 | Ac-PL3-Asp-Npg-B5-Asp-3COOHF-Aib-Ala-Phe-[mXyl]Cys-PyrS2-3Thi-BztA-aMeC-Ala-NH2 |
| I-1387 | Ac-PL3-Asp-Npg-B5-Asp-3COOHF-Aib-Ala-Phe-[mPyr]Cys-PyrS2-3Thi-BztA-aMeC-Ala-NH2 |
| I-1388 | Ac-PL3-Asp-Npg-B5-Asp-3COOHF-Aib-Ala-Phe-[C3]Cys-PyrS2-3Thi-BztA-aMeC-Ala-NH2 |
| I-1389 | Ac-PL3-Asp-Npg-B5-Asp-3COOHF-Aib-Ala-Phe-[IsoE]Cys-PyrS2-3Thi-BztA-aMeC-Ala-NH2 |
| I-1390 | Ac-PL3-Asp-Npg-B5-Asp-3COOHF-Aib-Ala-Phe-[m5Meb]Cys-PyrS2-3Thi-BztA-aMeC-Ala-NH2 |
| I-1391 | Ac-PL3-Asp-Npg-B5-Asp-3COOHF-Aib-Ala-Phe-[33Oxe]Cys-PyrS2-3Thi-BztA-aMeC-Ala-NH2 |
| I-1392 | Ac-PL3-Asp-Npg-B5-Asp-3COOHF-Aib-Ala-Phe-Lys*3-PyrS2-3Thi-BztA-GlnR*3-Ala-Ala- |
| | [Ac]Lys-NH2 |
| I-1393 | Ac-PL3-Asp-Ile-B5-Asp-3COOHF-Aib-Ala-Phe-Lys*3-PyrS2-Phe-34ClF-GlnR*3-Ala-Ala- |
| | [Ac]Lys-NH2 |
| I-1394 | Ac-PL3-Asp-Npg-B5-Asp-3COOHF-Aib-Ala-Phe-Lys*3-PyrS2-3Thi-BztA-GlnR*3-Ala-Ala-Ala- |
| | [Ac]Lys-NH2 |
| I-1395 | Ac-PL3-Asp-Ile-B5-Asp-3COOHF-Aib-Ala-Phe-Lys*3-PyrS2-Phe-34ClF-GlnR*3-Ala-Ala-Ala- |
| | [Ac]Lys-NH2 |
| I-1396 | Ac-PL3-Asp-Npg-B5-Asp-[Ac]Dap-Aib-Ala-Phe-Lys*3-PyrS2-3Thi-BztA-GlnR*3-Ala-NH2 |
| I-1397 | Ac-PL3-Asp-Npg-B5-Asp-[CH2CO2H]Acp-Aib-Ala-Phe-Lys*3-PyrS2-3Thi-BztA-GlnR*3-Ala- |
| | NH2 |
| I-1398 | Ac-PL3-Asp-Npg-B5-Asp-[Pfbn]GA-Aib-Ala-Phe-Lys*3-PyrS2-3Thi-BztA-GlnR*3-Ala-NH2 |
| I-1399 | Ac-PL3-Asp-Npg-B5-Asp-[Tfb]GA-Aib-Ala-Phe-Lys*3-PyrS2-3Thi-BztA-GlnR*3-Ala-NH2 |
| I-1400 | Ac-PL3-Asp-Npg-B5-Asp-3COOHF-Aib-Ala-Phe-Lys*3-PyrS2-3Thi-BztA-GlnR*3-Ala-NHMe |
| I-1401 | Ac-PL3-Asp-Npg-B5-Asp-3COOHF-Aib-Ala-Phe-Lys*3-PyrS2-3Thi-BztA-GlnR*3-Ala-NHMe |
| I-1402 | Ac-PL3-Asp-Npg-B5-Asp-3COOHF-Aib-Ala-Phe-Lys*3-PyrS2-3Thi-BztA-GlnR*3-Ala-Ala- |
| | [mPEG4]Lys-NH2 |
| I-1403 | Ac-PL3-Asp-Npg-B5-Asp-3COOHF-Aib-Ala-Phe-Lys*3-PyrS2-3Thi-BztA-GlnR*3-Ala-Ala- |
| | [mPEG8]Lys-NH2 |
| I-1404 | Ac-PL3-Asp-Npg-B5-Asp-3COOHF-Aib-Ala-Phe-Lys*3-PyrS2-3Thi-BztA-GlnR*3-Ala-Ala- |
| | [mPEG16]Lys-NH2 |
| I-1405 | Ac-PL3-Asp-Ile-B5-Asp-3COOHF-Aib-Ala-Phe-Lys*3-PyrS2-Phe-34ClF-GlnR*3-Ala-Ala- |
| | [mPEG4]Lys-NH2 |
| I-1406 | Ac-PL3-Asp-Ile-B5-Asp-3COOHF-Aib-Ala-Phe-Lys*3-PyrS2-Phe-34ClF-GlnR*3-Ala-Ala- |
| | [mPEG8]Lys-NH2 |
| I-1407 | Ac-PL3-Asp-Ile-B5-Asp-3COOHF-Aib-Ala-Phe-Lys*3-PyrS2-Phe-34ClF-GlnR*3-Ala-Ala- |
| | [mPEG16]Lys-NH2 |
| I-1408 | Ac-PL3-Asp-Npg-B5-Asp-3COOHF-Aib-Ala-Phe-Lys*3-PyrS2-3Thi-BztA-GlnR*3-Ala-Ala-Ala- |
| | [mPEG8]Lys-NH2 |
| I-1409 | Ac-PL3-Asp-Npg-B5-Asp-3COOHF-Aib-Ala-Phe-Lys*3-PyrS2-3Thi-BztA-GlnR*3-Ala-Ala-Ala- |
| | [mPEG16]Lys-NH2 |
| I-1410 | Ac-PL3-Asp-Npg-B5-Asp-3COOHF-Aib-Ala-Phe-Lys*3-PyrS2-3Thi-BztA-GlnR*3-Ala-Ala-Ala- |
| | [mPEG37]Lys-NH2 |
| I-1411 | Ac-PL3-Asp-Ile-B5-Asp-3COOHF-Aib-Ala-Phe-Lys*3-PyrS2-Phe-34ClF-GlnR*3-Ala-Ala-Ala- |
| | [mPEG4]Lys-NH2 |
| I-1412 | Ac-PL3-Asp-Ile-B5-Asp-3COOHF-Aib-Ala-Phe-Lys*3-PyrS2-Phe-34ClF-GlnR*3-Ala-Ala-Ala- |
| | [mPEG8]Lys-NH2 |
| I-1413 | Ac-PL3-Asp-Ile-B5-Asp-3COOHF-Aib-Ala-Phe-Lys*3-PyrS2-Phe-34ClF-GlnR*3-Ala-Ala-Ala- |
| | [mPEG16]Lys-NH2 |
| I-1414 | Ac-PL3-Asp-Ile-B5-Asp-3COOHF-Aib-Ala-Phe-GlnR*3-PyrS2-Phe-34ClF-GlnMe2EDA*3-NH2 |
| I-1415 | Ac-PL3-Asp-Ile-B5-Asp-3COOHF-Aib-Ala-Phe-GlnR*3-PyrS2-Phe-34ClF-AsnMe2EDA*3-NH2 |
| I-1416 | Ac-PL3-Asp-Ile-B5-Asp-3COOHF-Aib-Ala-Phe-GlnR*3-PyrS2-Phe-34ClF-AsnMeEDA*3-NH2 |
| I-1417 | Ac-PL3-Asp-Ile-B5-Asp-3COOHF-Aib-Ala-Phe-AsnMeEDA*3-PyrS2-Phe-34ClF-GlnR*3-NH2 |
| I-1418 | Ac-PL3-Asp-Ile-B5-Asp-3COOHF-Aib-Ala-Phe-AsnMeEDA*3-PyrS2-Phe-34ClF-GlnR*3-NH2 |
| I-1419 | Ac-PL3-Asp-Ile-B5-Asp-3COOHF-Aib-Ala-Phe-GlnR*3-PyrS2-Phe-34ClF-AsnR3APyr*3-NH2 |
| I-1420 | Ac-PL3-Asp-Ile-B5-Asp-3COOHF-Aib-Ala-Phe-AsnR3APyr*3-PyrS2-Phe-34ClF-AsnR*3-NH2 |
| I-1421 | Ac-PL3-Asp-Ile-B5-Asp-3COOHF-Aib-Ala-Phe-AsnR3APyr*3-PyrS2-Phe-34ClF-GlnR*3-NH2 |
| I-1422 | Ac-PL3-Asp-Ile-B5-Asp-3COOHF-Aib-Ala-Phe-AsnR*3-PyrS2-Phe-34ClF-AsnS3APyr*3-NH2 |
| I-1423 | Ac-PL3-Asp-Ile-B5-Asp-3COOHF-Aib-Ala-Phe-GlnR*3-PyrS2-Phe-34ClF-AsnS3APyr*3-NH2 |
| I-1424 | Ac-PL3-Asp-Ile-B5-Asp-3COOHF-Aib-Ala-Phe-AsnS3APyr*3-PyrS2-Phe-34ClF-AsnR*3-NH2 |
| I-1425 | Ac-PL3-Asp-Npg-B5-Asp-3COOHF-Aib-Ala-Phe-[mPyr]hCys-PyrS2-3Thi-BztA-aMeC-Ala-NH2 |
| I-1426 | Ac-PL3-Asp-Npg-B5-Asp-3COOHF-Aib-Ala-Phe-[m5Meb]hCys-PyrS2-3Thi-BztA-aMeC-Ala- |
| | NH2 |
| I-1427 | Ac-PL3-Asp-Npg-B5-Asp-3COOHF-Aib-Ala-Phe-[C3]hCys-PyrS2-3Thi-BztA-aMeC-Ala-NH2 |
| I-1428 | Ac-PL3-Asp-Npg-B5-Asp-3COOHF-Aib-Ala-Phe-[Red]hCys-PyrS2-3Thi-BztA-aMeC-Ala-NH2 |
| I-1429 | Ac-PL3-Asp-Npg-B5-Asp-3COOHF-Aib-Ala-Phe-[IsoE]hCys-PyrS2-3Thi-BztA-aMeC-Ala-NH2 |
| I-1430 | Ac-PL3-Asp-Npg-B5-Asp-3COOHF-Aib-Ala-Phe-[13Ac]hCys-PyrS2-3Thi-BztA-aMeC-Ala-NH2 |
| I-1431 | Ac-PL3-Asp-Npg-B5-Asp-[Succinate]Dap-Aib-Ala-Phe-Lys*3-PyrS2-3Thi-BztA-GlnR*3-Ala-NH2 |
| I-1432 | Ac-PL3-Asp-Npg-B5-Asp-[Malonate]Dap-Aib-Ala-Phe-Lys*3-PyrS2-3Thi-BztA-GlnR*3-Ala-NH2 |
| I-1433 | Ac-PL3-Asp-Npg-B5-Asp-[Me2Mal]Dap-Aib-Ala-Phe-Lys*3-PyrS2-3Thi-BztA-GlnR*3-Ala-NH2 |
| I-1434 | Ac-PL3-Asp-Npg-B5-Asp-[SaiPrSuc]Dap-Aib-Ala-Phe-Lys*3-PyrS2-3Thi-BztA-GlnR*3-Ala-NH2 |
| I-1435 | Ac-PL3-Asp-Npg-B5-Asp-[SaMeSuc]Dap-Aib-Ala-Phe-Lys*3-PyrS2-3Thi-BztA-GlnR*3-Ala-NH2 |
| I-1436 | Ac-PL3-Asp-Npg-B5-Asp-[RaiPrSuc]Dap-Aib-Ala-Phe-Lys*3-PyrS2-3Thi-BztA-GlnR*3-Ala-NH2 |
| I-1437 | Ac-PL3-Asp-Npg-B5-Asp-3COOHF-Aib-Ala-Phe-TriAzLys*3-[4VinylBzt]PyrSa-3Thi-BztA- |
| | sAla*3-Ala-NH2 |
| I-1438 | Ac-PL3-Asp-Npg-B5-Asp-3COOHF-Aib-Ala-Phe-TriAzLys*3-[3OHBz]PyrSa-3Thi-BztA-sAla*3- |
| | Ala-NH2 |
| I-1439 | Ac-PL3-Asp-Npg-B5-Asp-3COOHF-Aib-Ala-Phe-TriAzLys*3-[3OHBz]PyrSa-3Thi-BztA-sAla*3- |
| | Ala-NH2 |
| I-1440 | Ac-PL3-Asp-Npg-B5-Asp-3COOHF-Aib-Ala-Phe-TriAzLys*3-[CO][Val]PyrSa-3Thi-BztA- |
| | sAla*3-Ala-NH2 |
| I-1441 | Ac-PL3-Asp-Npg-B5-Asp-3COOHF-Aib-Ala-Phe-TriAzLys*3-[CO][Val]PyrSa-3Thi-BztA- |
| | sAla*3-Ala-NH2 |
| I-1442 | Ac-PL3-Asp-Npg-B5-Asp-3COOHF-Aib-Ala-Phe-TriAzLys*3-[CO][dVal]PyrSa-3Thi-BztA- |
| | sAla*3-Ala-NH2 |
| I-1443 | Ac-PL3-Asp-Npg-B5-Asp-3COOHF-Aib-Ala-Phe-TriAzLys*3-[CO][Sar]PyrSa-3Thi-BztA-sAla*3- |
| | Ala-NH2 |
| I-1444 | Ac-PL3-Asp-Npg-B5-Asp-3COOHF-Aib-Ala-Phe-TriAzLys*3-[CO][Nip]PyrSa-3Thi-BztA- |
| | sAla*3-Ala-NH2 |
| I-1445 | Ac-PL3-Asp-Npg-B5-Asp-3COOHF-Aib-Ala-Phe-TriAzLys*3-[CO][dNip]PyrSa-3Thi-BztA- |
| | sAla*3-Ala-NH2 |
| I-1446 | Ac-PL3-Asp-Npg-B5-Asp-3COOHF-Aib-Ala-Phe-TriAzLys*3-[CO][dNip]PyrSa-3Thi-BztA- |
| | sAla*3-Ala-NH2 |
| I-1447 | Ac-PL3-Asp-Npg-B5-Asp-3COOHF-Aib-Ala-Phe-TriAzLys*3-[CO][dNip]PyrSa-3Thi-BztA- |
| | sAla*3-Ala-NH2 |
| I-1448 | Ac-PL3-Asp-Npg-B5-Asp-3COOHF-Aib-Ala-Phe-TriAzLys*3-[CO][Pro]PyrSa-3Thi-BztA- |
| | sAla*3-Ala-NH2 |
| I-1449 | Ac-PL3-Asp-Npg-B5-Asp-3COOHF-Aib-Ala-Phe-TriAzLys*3-[2Me4VinPhAc2]PyrSa-3Thi-BztA- |
| | sAla*3-Ala-NH2 |
| I-1450 | Ac-PL3-Asp-Npg-B5-Asp-3COOHF-Aib-Ala-Phe-TriAzLys*3-[3SBz]PyrSa-3Thi-BztA-sAla*3- |
| | Ala-NH2 |
| I-1451 | Ac-PL3-Asp-Npg-B5-Asp-3COOHF-Aib-Ala-Phe-[m5Pyr]Cys-PyrS2-3Thi-BztA-Cys-Ala-NH2 |
| I-1452 | Ac-S6-Pro-Asp-Npg-B5-Asp-3COOHF-Aib-Ala-Phe-Lys*3-PyrS2-Phe-34ClF-GlnR*3-NH2 |
| I-1453 | Ac-PL3-Asp-Npg-B5-Asp-3COOHF-Aib-Ala-Phe-[m50Meb]Cys-PyrS2-3Thi-BztA-Cys-Ala-NH2 |
| I-1454 | Ac-PL3-Asp-Npg-B5-Asp-3COOHF-Aib-Ala-Phe-[mPyr]Cys-PyrS2-3Thi-BztA-Pen-Ala-NH2 |
| I-1455 | Ac-PL3-Asp-Npg-B5-Asp-3COOHF-Aib-Ala-Phe-[m5Pyr]Cys-PyrS2-3Thi-BztA-Pen-Ala-NH2 |
| I-1456 | Ac-PL3-Asp-Npg-B5-Asp-3COOHF-Aib-Ala-Phe-[m50Meb]Cys-PyrS2-3Thi-BztA-Pen-Ala-NH2 |
| I-1457 | Ac-PL3-Asp-Npg-B5-Asp-3COOHF-Aib-Ala-Phe-[Red]Cys-PyrS2-3Thi-BztA-Pen-Ala-NH2 |
| I-1458 | Ac-PL3-Asp-Npg-B5-Asp-3COOHF-Aib-Ala-Phe-[IsoE]Cys-PyrS2-3Thi-BztA-Pen-Ala-NH2 |
| I-1459 | Ac-PL3-Asp-Npg-B5-Asp-3COOHF-Aib-Ala-Phe-[C3]Cys-PyrS2-3Thi-BztA-Pen-Ala-NH2 |
| I-1460 | Ac-PL3-Asp-Npg-B5-Asp-3COOHF-Aib-Ala-Phe-[IsoE]hCysOx-PyrS2-3Thi-BztA-aMeC-Ala- |
| | NH2 |
| I-1461 | Ac-PL3-Asp-Npg-B5-Asp-3COOHF-Aib-Ala-Phe-[mPyr]Cys-PyrS2-3Thi-BztA-hCys-Ala-NH2 |
| I-1462 | Ac-PL3-Asp-Npg-B5-Asp-3COOHF-Aib-Ala-Phe-[IsoE]Cys-PyrS2-3Thi-BztA-hCys-Ala-NH2 |
| I-1463 | Ac-S5-Glu-Asp-Npg-B5-Asp-3COOHF-Aib-Ala-Phe-Lys*3-PyrS2-Phe-34ClF-GlnR*3-NH2 |
| I-1464 | Ac-S6-Val-Asp-Npg-B5-Asp-3COOHF-Aib-Ala-Phe-Lys*3-PyrS2-Phe-34ClF-GlnR*3-NH2 |
| I-1465 | Ac-S5-Ala-Asp-Npg-B5-Asp-3COOHF-Aib-Ala-Phe-Lys*3-PyrS2-Phe-34ClF-GlnR*3-NH2 |
| I-1466 | Ac-S5-Val-Asp-Npg-B5-Asp-3COOHF-Aib-Ala-Phe-Lys*3-PyrS2-Phe-34ClF-GlnR*3-NH2 |
| I-1467 | Ac-S6-Glu-Asp-Npg-B5-Asp-3COOHF-Aib-Ala-Phe-Lys*3-PyrS2-Phe-34ClF-GlnR*3-NH2 |
| I-1468 | Ac-S6-Ala-Asp-Npg-B5-Asp-3COOHF-Aib-Ala-Phe-Lys*3-PyrS2-Phe-34ClF-GlnR*3-NH2 |
| I-1469 | Ac-PL3-Asp-Npg-B5-Asp-3COOHF-Aib-Ala-Phe-[mPyr]hCys-PyrS2-3Thi-BztA-Pen-Ala-NH2 |
| I-1470 | Ac-PL3-Asp-Npg-B5-Asp-3COOHF-Aib-Ala-Phe-[m5Pyr]hCys-PyrS2-3Thi-BztA-Pen-Ala-NH2 |
| I-1471 | Ac-PL3-Asp-Npg-B5-Asp-3COOHF-Aib-Ala-Phe-[C3]hCys-PyrS2-3Thi-BztA-Pen-Ala-NH2 |
| I-1472 | Ac-PL3-Asp-Npg-B5-Asp-3COOHF-Aib-Ala-Phe-Lys*3-PyrS2-3Thi-BztA-GlnR*3-Thr-Ser-Ala- |
| | NH2 |
| I-1473 | Ac-PL3-Asp-Npg-B5-Asp-3COOHF-Aib-Ala-Phe-Lys*3-PyrS2-3Thi-BztA-GlnR*3-Thr-Ser-Leu- |
| | NH2 |
| I-1474 | Ac-PL3-Asp-Npg-B5-Asp-3COOHF-Aib-Ala-Phe-Lys*3-PyrS2-3Thi-BztA-GlnR*3-Thr-Ser-Leu- |
| | Pro-NH2 |
| I-1475 | Ac-PL3-Asp-Npg-B5-Asp-3COOHF-Aib-Ala-Phe-Lys*3-PyrS2-3Thi-BztA-GlnR*3-Thr-Ser-Thr- |
| | NH2 |
| I-1476 | Ac-PL3-Asp-Npg-B5-Asp-3COOHF-Aib-Ala-Phe-Lys*3-PyrS2-3Thi-BztA-GlnR*3-Thr-Ser-Thr- |
| | Pro-NH2 |
| I-1477 | Ac-PL3-Asp-Npg-B5-Asp-3COOHF-Aib-Ala-Phe-Lys*3-PyrS2-3Thi-BztA-GlnR*3-Thr-Ser-Pro- |
| | NH2 |
| I-1478 | Ac-PL3-Asp-Npg-B5-Asp-3COOHF-Aib-Ala-Phe-Lys*3-PyrS2-3Thi-BztA-GlnR*3-Val-Ser-Ala- |
| | NH2 |
| I-1479 | Ac-PL3-Asp-Npg-B5-Asp-3COOHF-Aib-Ala-Phe-Lys*3-PyrS2-3Thi-BztA-GlnR*3-Val-Ser-Leu- |
| | NH2 |
| I-1480 | Ac-PL3-Asp-Npg-B5-Asp-3COOHF-Aib-Ala-Phe-Lys*3-PyrS2-3Thi-BztA-GlnR*3-Val-Ser-Leu- |
| | Pro-NH2 |
| I-1481 | Ac-PL3-Asp-Npg-B5-Asp-3COOHF-Aib-Ala-Phe-Lys*3-PyrS2-3Thi-BztA-GlnR*3-Val-Ser-Thr- |
| | NH2 |
| I-1482 | Ac-PL3-Asp-Npg-B5-Asp-3COOHF-Aib-Ala-Phe-Lys*3-PyrS2-3Thi-BztA-GlnR*3-Val-Ser-Thr- |
| | Pro-NH2 |
| I-1483 | Ac-PL3-Asp-Npg-B5-Asp-3COOHF-Aib-Ala-Phe-Lys*3-PyrS2-3Thi-BztA-GlnR*3-Val-Ser-Pro- |
| | NH2 |
| I-1484 | Ac-PL3-Asp-R5-S5-Asp-3COOHF-Aib-Ala-Phe-PyrS2-Lys*3-3Thi-BztA-Ala-GlnR*3-NH2 |
| I-1485 | Ac-PL3-Asp-R5-S5-Asp-3COOHF-Aib-Ala-Phe-PyrS2-Lys*3-3Thi-BztA-Ala-GlnR*3-NH2 |
| I-1486 | NPyroR3-Asp-Npg-B4-Asp-3COOHF-Aib-Ala-Phe-Lys*3-PyrS3-3Thi-BztA-GlnR*3-Ala-NH2 |
| I-1487 | NPyroR3-Asp-Npg-B4-Asp-3COOHF-Aib-Ala-Phe-Lys*3-PyrS3-3Thi-BztA-GlnR*3-Ala-NH2 |
| I-1488 | NPyroR3-Asp-Npg-B5-Asp-3COOHF-Aib-Ala-Phe-Lys*3-PyrS2-3Thi-BztA-GlnR*3-Ala-NH2 |
| I-1489 | NPyroR3-Asp-Npg-B5-Asp-3COOHF-Aib-Ala-Phe-Lys*3-PyrS2-3Thi-BztA-GlnR*3-Ala-NH2 |
| I-1490 | NPyroR3-Asp-Npg-B6-Asp-3COOHF-Aib-Ala-Phe-Lys*3-PyrS1-3Thi-BztA-GlnR*3-Ala-NH2 |
| I-1491 | NPyroR3-Asp-Npg-B6-Asp-3COOHF-Aib-Ala-Phe-Lys*3-PyrS1-3Thi-BztA-GlnR*3-Ala-NH2 |
| I-1492 | NPyroR3-Asp-Ala-B4-Asp-3COOHF-Aib-Ala-Phe-Lys*3-PyrS3-3Thi-BztA-GlnR*3-Ala-NH2 |
| I-1493 | NPyroR3-Asp-Ala-B5-Asp-3COOHF-Aib-Ala-Phe-Lys*3-PyrS2-3Thi-BztA-GlnR*3-Ala-NH2 |
| I-1494 | NPyroR3-Asp-Ala-B6-Asp-3COOHF-Aib-Ala-Phe-Lys*3-PyrS1-3Thi-BztA-GlnR*3-Ala-NH2 |
| I-1495 | NPyroR3-Asp-Ala-B6-Asp-3COOHF-Aib-Ala-Phe-Lys*3-PyrS1-3Thi-BztA-GlnR*3-Ala-NH2 |
| I-1496 | NPyroR3-Asp-Npg-B4-Asp-3COOHF-Aib-Ala-Phe-Lys*3-PyrS3-3Thi-BztA-GlnR*3-Ala-NH2 |
| I-1497 | NPyroR3-Asp-Npg-B5-Asp-3COOHF-Aib-Ala-Phe-Lys*3-PyrS2-3Thi-BztA-GlnR*3-Ala-NH2 |
| I-1498 | NPyroR3-Asp-Npg-B6-Asp-3COOHF-Aib-Ala-Phe-Lys*3-PyrS1-3Thi-BztA-GlnR*3-Ala-NH2 |
| I-1499 | NPyroR3-Asp-Ala-B4-Asp-3COOHF-Aib-Ala-Phe-Lys*3-PyrS3-3Thi-BztA-GlnR*3-Ala-NH2 |
| I-1500 | NPyroR3-Asp-Ala-B5-Asp-3COOHF-Aib-Ala-Phe-Lys*3-PyrS2-3Thi-BztA-GlnR*3-Ala-NH2 |
| I-1501 | NPyroR3-Asp-Ala-B6-Asp-3COOHF-Aib-Ala-Phe-Lys*3-PyrS1-3Thi-BztA-GlnR*3-Ala-NH2 |
| I-1502 | Ac-PL3-Asp-Cha-B5-Asp-3COOHF-Aib-Ala-Phe-Lys*3-PyrS2-2ClF-34ClF-GlnR*3-NH2 |
| I-1503 | Ac-PL3-Asp-Cha-B5-Asp-3COOHF-Ala-Ala-Phe-Lys*3-PyrS2-2ClF-34ClF-GlnR*3-NH2 |
| I-1504 | Ac-PL3-Asp-Cha-B5-Asp-3COOHF-CyLeu-Ala-Phe-Lys*3-PyrS2-2ClF-34ClF-GlnR*3-NH2 |
| I-1505 | Ac-PL3-Asp-Chg-B5-Asp-3COOHF-Aib-Ala-Phe-Lys*3-PyrS2-2ClF-34ClF-GlnR*3-NH2 |
| I-1506 | Ac-PL3-Asp-Chg-B5-Asp-3COOHF-Ala-Ala-Phe-Lys*3-PyrS2-2ClF-34ClF-GlnR*3-NH2 |
| I-1507 | Ac-PL3-Asp-Chg-B5-Asp-3COOHF-CyLeu-Ala-Phe-Lys*3-PyrS2-2ClF-34ClF-GlnR*3-NH2 |
| I-1508 | Ac-PL3-Asp-Ile-B5-Asp-3COOHF-Aib-Ala-Phe-Lys*3-PyrS2-2MeF-34ClF-GlnR*3-NH2 |
| I-1509 | Ac-PL3-Asp-Ile-B5-Asp-3COOHF-Aib-Ala-Phe-Lys*3-PyrS2-2MeF-34ClF-GlnR*3-NH2 |
| I-1510 | Ac-PL3-Asp-Ile-B5-Asp-3COOHF-Ala-Ala-Phe-Lys*3-PyrS2-2MeF-34ClF-GlnR*3-NH2 |
| I-1511 | Ac-PL3-Asp-Ile-B5-Asp-3COOHF-CyLeu-Ala-Phe-Lys*3-PyrS2-2MeF-34ClF-GlnR*3-NH2 |
| I-1512 | Ac-PL3-Asp-Leu-B5-Asp-3COOHF-Aib-Ala-Phe-Lys*3-PyrS2-2MeF-34ClF-GlnR*3-NH2 |
| I-1513 | Ac-PL3-Asp-Leu-B5-Asp-3COOHF-Ala-Ala-Phe-Lys*3-PyrS2-2MeF-34ClF-GlnR*3-NH2 |
| I-1514 | Ac-PL3-Asp-Leu-B5-Asp-3COOHF-CyLeu-Ala-Phe-Lys*3-PyrS2-2MeF-34ClF-GlnR*3-NH2 |
| I-1515 | Ac-PL3-Asp-Cha-B5-Asp-3COOHF-Aib-Ala-Phe-Lys*3-PyrS2-2MeF-34ClF-GlnR*3-NH2 |
| I-1516 | Ac-PL3-Asp-Cha-B5-Asp-3COOHF-Ala-Ala-Phe-Lys*3-PyrS2-2MeF-34ClF-GlnR*3-NH2 |
| I-1517 | Ac-PL3-Asp-Chg-B5-Asp-3COOHF-Aib-Ala-Phe-Lys*3-PyrS2-2MeF-34ClF-GlnR*3-NH2 |
| I-1518 | Ac-PL3-Asp-Chg-B5-Asp-3COOHF-Ala-Ala-Phe-Lys*3-PyrS2-2MeF-34ClF-GlnR*3-NH2 |
| I-1519 | Ac-PL3-Asp-Npg-B5-Asp-3COOHF-Aib-Ala-Phe-[Mxyl]Cys-PyrS2-3Thi-BztA-Cys-Ser-NH2 |
| I-1520 | Ac-PL3-Asp-Npg-B5-Asp-3COOHF-Aib-Ala-Phe-[Mpyr]Cys-PyrS2-3Thi-BztA-Cys-Ser-NH2 |
| I-1521 | Ac-PL3-Asp-Npg-B5-Asp-3COOHF-Aib-Ala-Phe-[Red]Cys-PyrS2-3Thi-BztA-Cys-Ser-NH2 |
| I-1522 | Ac-PL3-Asp-Npg-B5-Asp-3COOHF-Aib-Ala-Phe-[C3]Cys-PyrS2-3Thi-BztA-Cys-Ser-NH2 |
| I-1523 | Ac-S6-Aib-Asp-Npg-B5-Asp-3COOHF-Aib-Ala-Phe-Lys*3-PyrS2-Phe-34ClF-GlnR*3-NH2 |
| I-1524 | Ac-S6-MePro-Asp-Npg-B5-Asp-3COOHF-Aib-Ala-Phe-Lys*3-PyrS2-Phe-34ClF-GlnR*3-NH2 |
| I-1525 | Ac-PL3-Asp-Npg-B5-Asp-3COOHF-Aib-Ala-Phe-Lys*3-PyrS2-3Thi-BztA-GlnR*3-Ala-Ala-Ala- |
| | [PEG4triPEG16]Lys-NH2 |
| I-1526 | Ac-PL3-Asp-Npg-B5-Asp-3COOHF-Aib-Ala-Phe-Lys*3-PyrS2-3Thi-BztA-GlnR*3-Ala-Ala-Ala- |
| | [PEG4triPEG36]Lys-NH2 |
| I-1527 | Ac-PL3-Asp-Cha-B5-Asp-3COOHF-Aib-Ala-Phe-Lys*3-PyrS2-2ClF-BztA-GlnR*3-NH2 |
| I-1528 | Ac-PL3-Asp-Cha-B5-Asp-3COOHF-Ala-Ala-Phe-Lys*3-PyrS2-2ClF-BztA-GlnR*3-NH2 |
| I-1529 | Ac-PL3-Asp-Cha-B5-Asp-3COOHF-CyLeu-Ala-Phe-Lys*3-PyrS2-2ClF-BztA-GlnR*3-NH2 |
| I-1530 | Ac-PL3-Asp-Chg-B5-Asp-3COOHF-Aib-Ala-Phe-Lys*3-PyrS2-2ClF-BztA-GlnR*3-NH2 |
| I-1531 | Ac-PL3-Asp-Chg-B5-Asp-3COOHF-Ala-Ala-Phe-Lys*3-PyrS2-2ClF-BztA-GlnR*3-NH2 |
| I-1532 | Ac-PL3-Asp-Npg-B5-Asp-3COOHF-Aib-Ala-Phe-Lys*3-PyrS2-DipA-34ClF-GlnR*3-NH2 |
| I-1533 | Ac-PL3-Asp-Npg-B5-Asp-3COOHF-Aib-Ala-Phe-Lys*3-PyrS2-DipA-34ClF-GlnR*3-NH2 |
| I-1534 | Ac-PL3-Asp-Ile-B5-Asp-3COOHF-Aib-Ala-Phe-Lys*3-PyrS2-DipA-34ClF-GlnR*3-NH2 |
| I-1535 | Ac-PL3-Asp-Ile-B5-Asp-3COOHF-Aib-Ala-Phe-Lys*3-PyrS2-DipA-34ClF-GlnR*3-NH2 |
| I-1536 | Ac-PL3-Asp-Npg-B5-Asp-3COOHF-Aib-Ala-Phe-Lys*3-PyrS2-DipA-BztA-GlnR*3-NH2 |
| I-1537 | Ac-PL3-Asp-Npg-B5-Asp-3COOHF-Aib-Ala-Phe-Lys*3-PyrS2-2FF-34ClF-GlnR*3-NH2 |
| I-1538 | Ac-PL3-Asp-Npg-B5-Asp-3COOHF-Aib-Ala-Phe-Lys*3-PyrS2-2FF-34ClF-GlnR*3-NH2 |
| I-1539 | Ac-PL3-Asp-Ile-B5-Asp-3COOHF-Aib-Ala-Phe-Lys*3-PyrS2-2FF-34ClF-GlnR*3-NH2 |
| I-1540 | Ac-PL3-Asp-Ile-B5-Asp-3COOHF-Aib-Ala-Phe-Lys*3-PyrS2-2FF-34ClF-GlnR*3-NH2 |
| I-1541 | Ac-PL3-Asp-Npg-B5-Asp-3COOHF-Aib-Ala-Phe-Lys*3-PyrS2-2FF-BztA-GlnR*3-NH2 |
| I-1542 | Ac-PL3-Asp-Npg-B5-Asp-3COOHF-Aib-Ala-Phe-Lys*3-PyrS2-2FF-BztA-GlnR*3-NH2 |
| I-1543 | Ac-PL3-Asp-Ile-B5-Asp-3COOHF-Aib-Ala-Phe-Lys*3-PyrS2-2FF-BztA-GlnR*3-NH2 |
| I-1544 | Ac-PL3-Asp-Ile-B5-Asp-3COOHF-Aib-Ala-Phe-Lys*3-PyrS2-2FF-BztA-GlnR*3-NH2 |
| I-1545 | Ac-PL3-Asp-Npg-B5-Asp-3COOHF-Aib-Ala-Phe-Lys*3-PyrS2-2MeF-BztA-GlnR*3-NH2 |
| I-1546 | Ac-PL3-Asp-Ile-B5-Asp-3COOHF-Aib-Ala-Phe-Lys*3-PyrS2-2MeF-BztA-GlnR*3-NH2 |
| I-1547 | Ac-PL3-Asp-Ile-B5-Asp-3COOHF-Aib-Ala-Phe-Lys*3-PyrS2-2MeF-BztA-GlnR*3-NH2 |
| I-1548 | NPyroR3-Asp-Npg-B5-Asp-3COOHF-Aib-Ala-Phe-Lys*3-PyrS2-3Thi-34ClF-GlnR*3-NH2 |
| I-1549 | NPyroR3-Asp-Ala-B5-Asp-3COOHF-Aib-Ala-Phe-Lys*3-PyrS2-3Thi-34ClF-GlnR*3-NH2 |
| I-1550 | NPyroR3-Asp-Ile-B5-Asp-3COOHF-Aib-Ala-Phe-Lys*3-PyrS2-3Thi-34ClF-GlnR*3-NH2 |
| I-1551 | NPyroR3-Asp-Val-B5-Asp-3COOHF-Aib-Ala-Phe-Lys*3-PyrS2-3Thi-34ClF-GlnR*3-NH2 |
| I-1552 | NPyroR3-Asp-Leu-B5-Asp-3COOHF-Aib-Ala-Phe-Lys*3-PyrS2-3Thi-34ClF-GlnR*3-NH2 |
| I-1553 | NPyroR3-Asp-Phe-B5-Asp-3COOHF-Aib-Ala-Phe-Lys*3-PyrS2-3Thi-34ClF-GlnR*3-NH2 |
| I-1554 | NPyroR3-Asp-Chg-B5-Asp-3COOHF-Aib-Ala-Phe-Lys*3-PyrS2-3Thi-34ClF-GlnR*3-NH2 |
| I-1555 | NPyroR3-Asp-Cha-B5-Asp-3COOHF-Aib-Ala-Phe-Lys*3-PyrS2-3Thi-34ClF-GlnR*3-NH2 |
| I-1556 | NPyroR3-Asp-DipA-B5-Asp-3COOHF-Aib-Ala-Phe-Lys*3-PyrS2-3Thi-34ClF-GlnR*3-NH2 |
| I-1557 | NPyroR3-Asn-Npg-B5-Asp-3COOHF-Aib-Ala-Phe-Lys*3-PyrS2-3Thi-34ClF-GlnR*3-NH2 |
| I-1558 | NPyroR3-Ser-Npg-B5-Asp-3COOHF-Aib-Ala-Phe-Lys*3-PyrS2-3Thi-34ClF-GlnR*3-NH2 |
| I-1559 | NPyroR3-Asp-Npg-B5-Asp-3COOHF-Ala-Ala-Phe-Lys*3-PyrS2-3Thi-34ClF-GlnR*3-NH2 |
| I-1560 | C3a-PL3-Asp-Npg-B5-Asp-3COOHF-Aib-Ala-Phe-Lys*3-PyrS2-Phe-34ClF-GlnR*3-NH2 |
| I-1561 | C3a-PL3-Asp-Npg-B5-Asp-3COOHF-Aib-Ala-Phe-Lys*3-PyrS2-Phe-34ClF-GlnR*3-NH2 |
| I-1562 | Bua-PL3-Asp-Npg-B5-Asp-3COOHF-Aib-Ala-Phe-Lys*3-PyrS2-Phe-34ClF-GlnR*3-NH2 |
| I-1563 | isobutyryl-PL3-Asp-Npg-B5-Asp-3COOHF-Aib-Ala-Phe-Lys*3-PyrS2-Phe-34ClF-GlnR*3-NH2 |
| I-1564 | Cpc-PL3-Asp-Npg-B5-Asp-3COOHF-Aib-Ala-Phe-Lys*3-PyrS2-Phe-34ClF-GlnR*3-NH2 |
| I-1565 | Cpc-PL3-Asp-Npg-B5-Asp-3COOHF-Aib-Ala-Phe-Lys*3-PyrS2-Phe-34ClF-GlnR*3-NH2 |
| I-1566 | Cbc-PL3-Asp-Npg-B5-Asp-3COOHF-Aib-Ala-Phe-Lys*3-PyrS2-Phe-34ClF-GlnR*3-NH2 |
| I-1567 | Cbc-PL3-Asp-Npg-B5-Asp-3COOHF-Aib-Ala-Phe-Lys*3-PyrS2-Phe-34ClF-GlnR*3-NH2 |
| I-1568 | CypCO-PL3-Asp-Npg-B5-Asp-3COOHF-Aib-Ala-Phe-Lys*3-PyrS2-Phe-34ClF-GlnR*3-NH2 |
| I-1569 | CypCO-PL3-Asp-Npg-B5-Asp-3COOHF-Aib-Ala-Phe-Lys*3-PyrS2-Phe-34ClF-GlnR*3-NH2 |
| I-1570 | 4THPCO-PL3-Asp-Npg-B5-Asp-3COOHF-Aib-Ala-Phe-Lys*3-PyrS2-Phe-34ClF-GlnR*3-NH2 |
| I-1571 | 4THPCO-PL3-Asp-Npg-B5-Asp-3COOHF-Aib-Ala-Phe-Lys*3-PyrS2-Phe-34ClF-GlnR*3-NH2 |
| I-1572 | C3a-PL3-Asp-Cha-B5-Asp-3COOHF-Aib-Ala-Phe-Lys*3-PyrS2-3Thi-34ClF-GlnR*3-NH2 |
| I-1573 | C3a-PL3-Asp-Cha-B5-Asp-3COOHF-Aib-Ala-Phe-Lys*3-PyrS2-3Thi-34ClF-GlnR*3-NH2 |
| I-1574 | Bua-PL3-Asp-Cha-B5-Asp-3COOHF-Aib-Ala-Phe-Lys*3-PyrS2-3Thi-34ClF-GlnR*3-NH2 |
| I-1575 | Bua-PL3-Asp-Cha-B5-Asp-3COOHF-Aib-Ala-Phe-Lys*3-PyrS2-3Thi-34ClF-GlnR*3-NH2 |
| I-1576 | isobutyryl-PL3-Asp-Cha-B5-Asp-3COOHF-Aib-Ala-Phe-Lys*3-PyrS2-3Thi-34ClF-GlnR*3-NH2 |
| I-1577 | Cpc-PL3-Asp-Cha-B5-Asp-3COOHF-Aib-Ala-Phe-Lys*3-PyrS2-3Thi-34ClF-GlnR*3-NH2 |
| I-1578 | Cpc-PL3-Asp-Cha-B5-Asp-3COOHF-Aib-Ala-Phe-Lys*3-PyrS2-3Thi-34ClF-GlnR*3-NH2 |
| I-1579 | Cbc-PL3-Asp-Cha-B5-Asp-3COOHF-Aib-Ala-Phe-Lys*3-PyrS2-3Thi-34ClF-GlnR*3-NH2 |
| I-1580 | CypCO-PL3-Asp-Cha-B5-Asp-3COOHF-Aib-Ala-Phe-Lys*3-PyrS2-3Thi-34ClF-GlnR*3-NH2 |
| I-1581 | 4THPCO-PL3-Asp-Cha-B5-Asp-3COOHF-Aib-Ala-Phe-Lys*3-PyrS2-3Thi-34ClF-GlnR*3-NH2 |
| I-1582 | C3a-PL3-Asp-Ile-B5-Asp-3COOHF-Aib-Ala-Phe-Lys*3-PyrS2-3Thi-34ClF-GlnR*3-NH2 |
| I-1583 | C3a-PL3-Asp-Ile-B5-Asp-3COOHF-Aib-Ala-Phe-Lys*3-PyrS2-3Thi-34ClF-GlnR*3-NH2 |
| I-1584 | Bua-PL3-Asp-Ile-B5-Asp-3COOHF-Aib-Ala-Phe-Lys*3-PyrS2-3Thi-34ClF-GlnR*3-NH2 |
| I-1585 | Bua-PL3-Asp-Ile-B5-Asp-3COOHF-Aib-Ala-Phe-Lys*3-PyrS2-3Thi-34ClF-GlnR*3-NH2 |
| I-1586 | Cpc-PL3-Asp-Ile-B5-Asp-3COOHF-Aib-Ala-Phe-Lys*3-PyrS2-3Thi-34ClF-GlnR*3-NH2 |
| I-1587 | Cpc-PL3-Asp-Ile-B5-Asp-3COOHF-Aib-Ala-Phe-Lys*3-PyrS2-3Thi-34ClF-GlnR*3-NH2 |
| I-1588 | Cbc-PL3-Asp-Ile-B5-Asp-3COOHF-Aib-Ala-Phe-Lys*3-PyrS2-3Thi-34ClF-GlnR*3-NH2 |
| I-1589 | Cbc-PL3-Asp-Ile-B5-Asp-3COOHF-Aib-Ala-Phe-Lys*3-PyrS2-3Thi-34ClF-GlnR*3-NH2 |
| I-1590 | CypCO-PL3-Asp-Ile-B5-Asp-3COOHF-Aib-Ala-Phe-Lys*3-PyrS2-3Thi-34ClF-GlnR*3-NH2 |
| I-1591 | CypCO-PL3-Asp-Ile-B5-Asp-3COOHF-Aib-Ala-Phe-Lys*3-PyrS2-3Thi-34ClF-GlnR*3-NH2 |
| I-1592 | 4THPCO-PL3-Asp-Ile-B5-Asp-3COOHF-Aib-Ala-Phe-Lys*3-PyrS2-3Thi-34ClF-GlnR*3-NH2 |
| I-1593 | 4THPCO-PL3-Asp-Ile-B5-Asp-3COOHF-Aib-Ala-Phe-Lys*3-PyrS2-3Thi-34ClF-GlnR*3-NH2 |
| I-1594 | Ac-PL3-Asp-Ile-B5-Asp-3COOHF-Aib-Ala-Phe-Lys*3-PyrS2-Phe-Phe-GlnR*3-NH2 |
| I-1595 | Ac-PL3-Asp-Ile-B5-Asp-3COOHF-Aib-Ala-Phe-Lys*3-PyrS2-Phe-Phe-GlnR*3-NH2 |
| I-1596 | Ac-PL3-Asp-Ile-B5-Asp-3COOHF-Aib-Ala-Phe-Lys*3-PyrS2-Phe-2ClF-GlnR*3-NH2 |
| I-1597 | Ac-PL3-Asp-Ile-B5-Asp-3COOHF-Aib-Ala-Phe-Lys*3-PyrS2-Phe-2ClF-GlnR*3-NH2 |
| I-1598 | Ac-PL3-Asp-Ile-B5-Asp-3COOHF-Aib-Ala-Phe-Lys*3-PyrS2-Phe-3ClF-GlnR*3-NH2 |
| I-1599 | Ac-PL3-Asp-Ile-B5-Asp-3COOHF-Aib-Ala-Phe-Lys*3-PyrS2-Phe-3ClF-GlnR*3-NH2 |
| I-1600 | Ac-PL3-Asp-Ile-B5-Asp-3COOHF-Aib-Ala-Phe-Lys*3-PyrS2-Phe-4ClF-GlnR*3-NH2 |
| I-1601 | Ac-PL3-Asp-Ile-B5-Asp-3COOHF-Aib-Ala-Phe-Lys*3-PyrS2-Phe-3MeF-GlnR*3-NH2 |
| I-1602 | Ac-PL3-Asp-Ile-B5-Asp-3COOHF-Aib-Ala-Phe-Lys*3-PyrS2-Phe-2BrF-GlnR*3-NH2 |
| I-1603 | Ac-PL3-Asp-Ile-B5-Asp-3COOHF-Aib-Ala-Phe-Lys*3-PyrS2-Phe-2BrF-GlnR*3-NH2 |
| I-1604 | Ac-PL3-Asp-Ile-B5-Asp-3COOHF-Aib-Ala-Phe-Lys*3-PyrS2-Phe-3BrF-GlnR*3-NH2 |
| I-1605 | Ac-PL3-Asp-Ile-B5-Asp-3COOHF-Aib-Ala-Phe-Lys*3-PyrS2-Phe-3BrF-GlnR*3-NH2 |
| I-1606 | Ac-PL3-Asp-Ile-B5-Asp-3COOHF-Aib-Ala-Phe-Lys*3-PyrS2-Phe-4BrF-GlnR*3-NH2 |
| I-1607 | Ac-PL3-Asp-Ile-B5-Asp-3COOHF-Aib-Ala-Phe-Lys*3-PyrS2-Phe-4BrF-GlnR*3-NH2 |
| I-1608 | Ac-PL3-Asp-Ile-B5-Asp-3COOHF-Aib-Ala-Phe-Lys*3-PyrS2-Phe-3F3MeF-GlnR*3-NH2 |
| I-1609 | Ac-PL3-Asp-Ile-B5-Asp-3COOHF-Aib-Ala-Phe-Lys*3-PyrS2-Phe-3F3MeF-GlnR*3-NH2 |
| I-1610 | Ac-PL3-Asp-Ile-B5-Asp-3COOHF-Aib-Ala-Phe-Lys*3-PyrS2-Phe-4F3MeF-GlnR*3-NH2 |
| I-1611 | Ac-PL3-Asp-Ile-B5-Asp-3COOHF-Aib-Ala-Phe-Lys*3-PyrS2-Phe-4F3MeF-GlnR*3-NH2 |
| I-1612 | Ac-PL3-Asp-Ile-B5-Asp-3COOHF-Aib-Ala-Phe-Lys*3-PyrS2-3Thi-2BrF-GlnR*3-NH2 |
| I-1613 | Ac-PL3-Asp-Ile-B5-Asp-3COOHF-Aib-Ala-Phe-Lys*3-PyrS2-3Thi-3BrF-GlnR*3-NH2 |
| I-1614 | Ac-PL3-Asp-Ile-B5-Asp-3COOHF-Aib-Ala-Phe-Lys*3-PyrS2-3Thi-3F3MeF-GlnR*3-NH2 |
| I-1615 | Ac-PL3-Asp-Ile-B5-Asp-3COOHF-Aib-Ala-Phe-Lys*3-PyrS2-3Thi-4F3MeF-GlnR*3-NH2 |
| I-1616 | Ac-S5-Ala-Asp-Cha-B5-Asp-3COOHF-Aib-Ala-Phe-Lys*3-PyrS2-Phe-34ClF-GlnR*3-NH2 |
| I-1617 | Ac-S5-Pro-Asp-Cha-B5-Asp-3COOHF-Aib-Ala-Phe-Lys*3-PyrS2-Phe-34ClF-GlnR*3-NH2 |
| I-1618 | Ac-S5-Val-Asp-Cha-B5-Asp-3COOHF-Aib-Ala-Phe-Lys*3-PyrS2-Phe-34ClF-GlnR*3-NH2 |
| I-1619 | Ac-S5-Glu-Asp-Cha-B5-Asp-3COOHF-Aib-Ala-Phe-Lys*3-PyrS2-Phe-34ClF-GlnR*3-NH2 |
| I-1620 | Ac-S5-Ala-Asp-Chg-B5-Asp-3COOHF-Aib-Ala-Phe-Lys*3-PyrS2-Phe-34ClF-GlnR*3-NH2 |
| I-1621 | Ac-S5-Pro-Asp-Chg-B5-Asp-3COOHF-Aib-Ala-Phe-Lys*3-PyrS2-Phe-34ClF-GlnR*3-NH2 |
| I-1622 | Ac-S5-Val-Asp-Chg-B5-Asp-3COOHF-Aib-Ala-Phe-Lys*3-PyrS2-Phe-34ClF-GlnR*3-NH2 |
| I-1623 | Ac-S5-Glu-Asp-Chg-B5-Asp-3COOHF-Aib-Ala-Phe-Lys*3-PyrS2-Phe-34ClF-GlnR*3-NH2 |
| I-1624 | Ac-S6-Ala-Asp-Cha-B5-Asp-3COOHF-Aib-Ala-Phe-Lys*3-PyrS2-Phe-34ClF-GlnR*3-NH2 |
| I-1625 | Ac-S6-Ala-Asp-Chg-B5-Asp-3COOHF-Aib-Ala-Phe-Lys*3-PyrS2-Phe-34ClF-GlnR*3-NH2 |
| I-1626 | Ac-S5-Ala-Asp-Cha-B5-Asp-3COOHF-Aib-Ala-Phe-Lys*3-PyrS1-Phe-34ClF-GlnR*3-NH2 |
| I-1627 | Ac-S5-Ala-Asp-Chg-B5-Asp-3COOHF-Aib-Ala-Phe-Lys*3-PyrS1-Phe-34ClF-GlnR*3-NH2 |
| I-1628 | Ac-PL3-Asp-Npg-B5-Asp-3COOHF-Aib-Ala-Phe-Lys*3-PyrS2-2F3MeF-BztA-GlnR*3-Lys-NH2 |
| I-1629 | Ac-PL3-Asp-Npg-B5-Asp-3COOHF-Aib-Ala-Phe-Lys*3-PyrS2-2F3MeF-BztA-GlnR*3-Lys-NH2 |
| I-1630 | Ac-PL3-Asn-DipA-B5-Asp-3COOHF-CyLeu-Ala-Phe-Lys*3-PyrS2-3Thi-34ClF-GlnR*3-NH2 |
| I-1631 | Ac-PL3-aThr-DipA-B5-Asp-3COOHF-CyLeu-Ala-Phe-Lys*3-PyrS2-3Thi-34ClF-GlnR*3-NH2 |
| I-1632 | Ac-PL3-Asp-DipA-B5-Asn-3COOHF-CyLeu-Ala-Phe-Lys*3-PyrS2-3Thi-34ClF-GlnR*3-NH2 |
| I-1633 | Ac-PL3-Asp-DipA-B5-aThr-3COOHF-CyLeu-Ala-Phe-Lys*3-PyrS2-3Thi-34ClF-GlnR*3-NH2 |
| I-1634 | Ac-PL3-Asp-DipA-B5-Asp-3COOHF-nLeu-Ala-Phe-Lys*3-PyrS2-3Thi-34ClF-GlnR*3-NH2 |
| I-1635 | Ac-PL3-Asp-DipA-B5-Asp-3COOHF-Thr-Ala-Phe-Lys*3-PyrS2-3Thi-34ClF-GlnR*3-NH2 |
| I-1636 | Ac-PL3-Asn-DipA-B5-Asp-3COOHF-nLeu-Ala-Phe-Lys*3-PyrS2-3Thi-34ClF-GlnR*3-NH2 |
| I-1637 | Ac-PL3-aThr-DipA-B5-Asp-3COOHF-nLeu-Ala-Phe-Lys*3-PyrS2-3Thi-34ClF-GlnR*3-NH2 |
| I-1638 | Ac-PL3-Asp-DipA-B5-Asn-3COOHF-nLeu-Ala-Phe-Lys*3-PyrS2-3Thi-34ClF-GlnR*3-NH2 |
| I-1639 | Ac-PL3-Asp-DipA-B5-aThr-3COOHF-nLeu-Ala-Phe-Lys*3-PyrS2-3Thi-34ClF-GlnR*3-NH2 |
| I-1640 | Ac-PL3-Asp-DipA-B5-Asp-3COOHF-CyLeu-Ala-Phe-Lys*3-PyrS2-2F3MeF-34ClF-GlnR*3-NH2 |
| I-1641 | Ac-PL3-Asp-Cha-B5-Asp-3COOHF-Aib-Ala-Phe-Lys*3-PyrS2-2ClF-BztA-GlnR*3-Leu-NH2 |
| I-1642 | Ac-PL3-Asp-Cha-B5-Asp-3COOHF-Aib-Ala-Phe-Lys*3-PyrS2-2ClF-BztA-GlnR*3-Leu-NH2 |
| I-1643 | Ac-PL3-Asp-Cha-B5-Asp-3COOHF-Aib-Ala-Phe-Lys*3-PyrS2-2ClF-BztA-GlnR*3-Ala-NH2 |
| I-1644 | Ac-PL3-Asp-Cha-B5-Asp-3COOHF-Aib-Ala-Phe-Lys*3-PyrS2-2ClF-BztA-GlnR*3-Ala-NH2 |
| I-1645 | Ac-PL3-Asp-Cha-B5-Asp-3COOHF-Aib-Ala-Phe-Lys*3-PyrS2-Phe-BztA-GlnR*3-Leu-NH2 |
| I-1646 | Ac-PL3-Asp-Cha-B5-Asp-3COOHF-Aib-Ala-Phe-Lys*3-PyrS2-Phe-BztA-GlnR*3-Leu-NH2 |
| I-1647 | Ac-PL3-Asp-Cha-B5-Asp-3COOHF-Aib-Ala-Phe-Lys*3-PyrS2-Phe-BztA-GlnR*3-Ala-NH2 |
| I-1648 | Ac-PL3-Asp-Cha-B5-Asp-3COOHF-Aib-Ala-Phe-Lys*3-PyrS2-Phe-BztA-GlnR*3-NH2 |
| I-1649 | Ac-PL3-Asp-Cha-B5-Asp-3COOHF-Aib-Ala-Phe-Lys*3-PyrS2-Phe-BztA-GlnR*3-NH2 |
| I-1650 | Ac-PL3-Asp-Cha-B5-Asp-3COOHF-Aib-Ala-Phe-Lys*3-PyrS2-2FF-BztA-GlnR*3-Leu-NH2 |
| I-1651 | Ac-PL3-Asp-Cha-B5-Asp-3COOHF-Aib-Ala-Phe-Lys*3-PyrS2-2FF-BztA-GlnR*3-Leu-NH2 |
| I-1652 | Ac-PL3-Asp-Cha-B5-Asp-3COOHF-Aib-Ala-Phe-Lys*3-PyrS2-2FF-BztA-GlnR*3-Ala-NH2 |
| I-1653 | Ac-PL3-Asp-Cha-B5-Asp-3COOHF-Aib-Ala-Phe-Lys*3-PyrS2-2FF-BztA-GlnR*3-NH2 |
| I-1654 | Ac-PL3-Asp-Cha-B5-Asp-3COOHF-Aib-Ala-Phe-Lys*3-PyrS2-2F3MeF-BztA-GlnR*3-Leu-NH2 |
| I-1655 | Ac-PL3-Asp-Cha-B5-Asp-3COOHF-Aib-Ala-Phe-Lys*3-PyrS2-2F3MeF-BztA-GlnR*3-Leu-NH2 |
| I-1656 | Ac-PL3-Asp-Cha-B5-Asp-3COOHF-Aib-Ala-Phe-Lys*3-PyrS2-2F3MeF-BztA-GlnR*3-Ala-NH2 |
| I-1657 | Ac-PL3-Asp-Cha-B5-Asp-3COOHF-Aib-Ala-Phe-Lys*3-PyrS2-2F3MeF-BztA-GlnR*3-Ala-NH2 |
| I-1658 | Ac-PL3-Asp-Cha-B5-Asp-3COOHF-Aib-Ala-Phe-Lys*3-PyrS2-2F3MeF-BztA-GlnR*3-NH2 |
| I-1659 | Ac-PL3-Asp-Cha-B5-Asp-3COOHF-Aib-Ala-Phe-Lys*3-PyrS2-2F3MeF-BztA-GlnR*3-NH2 |
| I-1660 | Ac-PL3-Asp-Npg-B5-Asp-3COOHF-Aib-Ala-Phe-Lys*3-PyrS2-[Bnc]2NH2F-BztA-GlnR*3-Ala- |
| | NH2 |
| I-1661 | Ac-PL3-Asp-Npg-B5-Asp-3COOHF-Aib-Ala-Phe-Lys*3-PyrS2-[Bnc]2NH2F-BztA-GlnR*3-Ala- |
| | NH2 |
| I-1662 | Ac-PL3-Asp-Npg-B5-Asp-3COOHF-Aib-Ala-Phe-Lys*3-PyrS2-[Phc]2NH2F-BztA-GlnR*3-Ala- |
| | NH2 |
| I-1663 | Ac-PL3-Asp-Npg-B5-Asp-3COOHF-Aib-Ala-Phe-Lys*3-PyrS2-[Phc]2NH2F-BztA-GlnR*3-Ala- |
| | NH2 |
| I-1664 | Ac-PL3-Asp-Npg-B5-Asp-3COOHF-Aib-Ala-Phe-Lys*3-PyrS2-[BiPh]2NH2F-BztA-GlnR*3-Ala- |
| | NH2 |
| I-1665 | Ac-PL3-Asp-Npg-B5-Asp-3COOHF-Aib-Ala-Phe-Lys*3-PyrS2-[BiPh]2NH2F-BztA-GlnR*3-Ala- |
| | NH2 |
| I-1666 | Ac-PL3-Asp-Npg-B5-Asp-3COOHF-Aib-Ala-Phe-Lys*3-PyrS2-[MePipAc]2NH2F-BztA-GlnR*3- |
| | Ala-NH2 |
| I-1667 | Ac-PL3-Asp-Npg-B5-Asp-3COOHF-Aib-Ala-Phe-Lys+3-PyrS2-[2IAPAc]2NH2F-BztA-GlnR*3- |
| | Ala-NH2 |
| I-1668 | Ac-PL3-Asp-Npg-B5-Asp-3COOHF-Aib-Ala-Phe-Lys*3-PyrS2-[2IAPAc]2NH2F-BztA-GlnR*3- |
| | Ala-NH2 |
| I-1669 | Ac-PL3-Asp-Npg-B5-Asp-3COOHF-Aib-Ala-Phe-Lys*3-PyrS2-[2IAPAc]2NH2F-BztA-GlnR*3- |
| | Ala-NH2 |
| I-1670 | Ac-PL3-Asp-Npg-B5-Asp-3COOHF-Aib-Ala-Phe-Lys+3-PyrS2-[3PyAc]2NH2F-BztA-GlnR*3- |
| | Ala-NH2 |
| I-1671 | Ac-PL3-Asp-Npg-B5-Asp-3COOHF-Aib-Ala-Phe-Lys*3-PyrS2-[3PyAc]2NH2F-BztA-GlnR*3- |
| | Ala-NH2 |
| I-1672 | Ac-PL3-Asp-Npg-B5-Asp-3COOHF-Aib-Ala-Phe-Lys*3-PyrS2-[2PyCypCO]2NH2F-BztA- |
| | GlnR*3-Ala-NH2 |
| I-1673 | Ac-S5-Asp-Asp-Npg-B5-Asp-3COOHF-Aib-Ala-Phe-Lys*3-PyrS2-Phe-34ClF-GlnR*3-NH2 |
| I-1674 | Ac-S5-Asp-Asn-Npg-B5-Asp-3COOHF-Aib-Ala-Phe-Lys*3-PyrS2-Phe-34ClF-GlnR*3-NH2 |
| I-1675 | Ac-S5-Asp-Ser-Npg-B5-Asp-3COOHF-Aib-Ala-Phe-Lys*3-PyrS2-Phe-34ClF-GlnR*3-NH2 |
| I-1676 | Ac-S5-Asp-Asp-Npg-B5-Glu-3COOHF-Aib-Ala-Phe-Lys*3-PyrS2-Phe-34ClF-GlnR*3-NH2 |
| I-1677 | Ac-S5-Glu-Asn-Npg-B5-Asp-3COOHF-Aib-Ala-Phe-Lys*3-PyrS2-Phe-34ClF-GlnR*3-NH2 |
| I-1678 | Ac-S5-Glu-Ser-Npg-B5-Asp-3COOHF-Aib-Ala-Phe-Lys*3-PyrS2-Phe-34ClF-GlnR*3-NH2 |
| I-1679 | Ac-S5-Glu-Asp-Npg-B5-Glu-3COOHF-Aib-Ala-Phe-Lys*3-PyrS2-Phe-34ClF-GlnR*3-NH2 |
| I-1680 | Ac-PL3-Asn-DipA-B5-Asp-3COOHF-nLeu-Ala-Phe-Lys*3-PyrS2-3Thi-BztA-GlnR*3-NH2 |
| I-1681 | Ac-PL3-Ser-DipA-B5-Asp-3COOHF-nLeu-Ala-Phe-Lys*3-PyrS2-3Thi-BztA-GlnR*3-NH2 |
| I-1682 | Ac-PL3-Thr-DipA-B5-Asp-3COOHF-nLeu-Ala-Phe-Lys*3-PyrS2-3Thi-BztA-GlnR*3-NH2 |
| I-1683 | Ac-PL3-Asp-DipA-B5-Ser-3COOHF-nLeu-Ala-Phe-Lys*3-PyrS2-3Thi-BztA-GlnR*3-NH2 |
| I-1684 | Ac-PL3-Asp-DipA-B5-Thr-3COOHF-nLeu-Ala-Phe-Lys*3-PyrS2-3Thi-BztA-GlnR*3-NH2 |
| I-1685 | Ac-PL3-Asp-DipA-B5-aThr-3COOHF-nLeu-Ala-Phe-Lys*3-PyrS2-3Thi-BztA-GlnR*3-NH2 |
| I-1686 | Ac-PL3-Asp-DipA-B5-Hse-3COOHF-nLeu-Ala-Phe-Lys*3-PyrS2-3Thi-BztA-GlnR*3-NH2 |
| I-1687 | Ac-PL3-aThr-DipA-B5-Asp-3COOHF-nLeu-Ala-3Thi-Lys*3-PyrS2-3Thi-BztA-GlnR*3-NH2 |
| I-1688 | Ac-S5-Ala-Asp-DipA-B5-Asp-3COOHF-nLeu-Ala-Phe-Lys*3-PyrS2-Phe-34ClF-GlnR*3-NH2 |
| I-1689 | Ac-S5-Ala-Asp-DipA-B5-Asp-3COOHF-nLeu-Ala-Phe-Lys*3-PyrS1-Phe-34ClF-GlnR*3-NH2 |
| I-1690 | Ac-S6-Ala-Asp-DipA-B5-Asp-3COOHF-nLeu-Ala-Phe-Lys*3-PyrS2-Phe-34ClF-GlnR*3-NH2 |
| I-1691 | Ac-S6-Ala-Asp-DipA-B5-Asp-3COOHF-nLeu-Ala-Phe-Lys*3-PyrS1-Phe-34ClF-GlnR*3-NH2 |
| I-1692 | Ac-S5-Ala-Asp-DipA-B5-Asp-3COOHF-Aib-Ala-Phe-Lys*3-PyrS2-Phe-34ClF-GlnR*3-NH2 |
| I-1693 | Ac-S5-Ala-Asp-DipA-B5-Asp-3COOHF-Aib-Ala-Phe-Lys*3-PyrS1-Phe-34ClF-GlnR*3-NH2 |
| I-1694 | Ac-S5-Pro-Asp-DipA-B5-Asp-3COOHF-Aib-Ala-Phe-Lys*3-PyrS1-Phe-34ClF-GlnR*3-NH2 |
| I-1695 | Ac-S6-Pro-Asp-DipA-B5-Asp-3COOHF-Aib-Ala-Phe-Lys*3-PyrS2-Phe-34ClF-GlnR*3-NH2 |
| I-1696 | Ac-S6-Pro-Asp-DipA-B5-Asp-3COOHF-Aib-Ala-Phe-Lys*3-PyrS1-Phe-34ClF-GlnR*3-NH2 |
| I-1697 | Ac-PL3-Asp-Ile-B5-Asp-3COOHF-Ala-Ala-Phe-Lys*3-PyrS2-Phe-34ClF-GlnR*3-NH2 |
| I-1698 | Ac-PL3-Asp-Ile-B5-Asp-3COOHF-Ala-Ala-Phe-Lys*3-PyrS1-Phe-34ClF-GlnR*3-NH2 |
| I-1699 | Ac-PL3-Asp-Leu-B5-Asp-3COOHF-Ala-Ala-Phe-Lys*3-PyrS2-Phe-34ClF-GlnR*3-NH2 |
| I-1700 | Ac-PL3-Asp-Leu-B5-Asp-3COOHF-Ala-Ala-Phe-Lys*3-PyrS1-Phe-34ClF-GlnR*3-NH2 |
| I-1701 | Ac-PL3-Asp-DipA-B5-Asp-3COOHF-Ala-Ala-Phe-Lys*3-PyrS2-3Thi-34ClF-GlnR*3-[mPEG8]- |
| | Lys-NH2 |
| I-1702 | Ac-PL3-Asp-DipA-B5-Asp-3COOHF-Ala-Ala-Phe-Lys*3-PyrS2-3Thi-34ClF-GlnR*3-[mPEG37]- |
| | Lys-NH2 |
| I-1703 | Ac-PL3-Asp-DipA-B5-Asp-3COOHF-Ala-Ala-Phe-Lys*3-PyrS2-3Thi-34ClF-GlnR*3-Ala-Ala- |
| | [mPEG8]-Lys-NH2 |
| I-1704 | Ac-PL3-Asp-DipA-B5-Asp-3COOHF-Ala-Ala-Phe-Lys*3-PyrS2-3Thi-34ClF-GlnR*3-Ala-Ala- |
| | [mPEG37]-Lys-NH2 |
| I-1705 | Ac-PL3-Asp-DipA-B5-Asp-3COOHF-Ala-Ala-Phe-Lys*3-PyrS2-3Thi-34ClF-GlnR*3-Ala-Ala- |
| | Ala-[mPEG8]-Lys |
| I-1706 | Ac-PL3-Asp-DipA-B5-Asp-3COOHF-Ala-Ala-Phe-Lys*3-PyrS2-3Thi-34ClF-GlnR*3-Ala-Ala- |
| | Ala-[mPEG37]-Lys |
| I-1707 | Ac-PL3-Asp-Npg-B5-Asp-3COOHF-Aib-Ala-Phe-Lys*3-PyrS2-3Thi-34ClF-GlnR*3-Ala-Ala-Ala- |
| | [mPEG8]-Lys |
| I-1708 | Ac-PL3-Asp-Npg-B5-Asp-3COOHF-Aib-Ala-Phe-Lys*3-PyrS2-3Thi-34ClF-GlnR*3-Ala-Ala-Ala- |
| | [mPEG37]-Lys |
| I-1709 | Ac-PL3-Asp-Npg-B5-Asp-3COOHF-Aib-Ala-Phe-Lys*3-PyrS2-3Thi-BztA-GlnR*3-OH |
| I-1710 | Bua-PL3-Asp-DipA-B5-Asp-3COOHF-CyLeu-Ala-Phe-Lys*3-PyrS2-3Thi-34ClF-GlnR*3-NH2 |
| I-1711 | Isovaleryl-PL3-Asp-DipA-B5-Asp-3COOHF-CyLeu-Ala-Phe-Lys*3-PyrS2-3Thi-34ClF-GlnR*3- |
| | NH2 |
| I-1712 | Cpc-PL3-Asp-DipA-B5-Asp-3COOHF-CyLeu-Ala-Phe-Lys*3-PyrS2-3Thi-34ClF-GlnR*3-NH2 |
| I-1713 | Cbc-PL3-Asp-DipA-B5-Asp-3COOHF-CyLeu-Ala-Phe-Lys*3-PyrS2-3Thi-34ClF-GlnR*3-NH2 |
| I-1714 | CypCO-PL3-Asp-DipA-B5-Asp-3COOHF-CyLeu-Ala-Phe-Lys*3-PyrS2-3Thi-34ClF-GlnR*3-NH2 |
| I-1715 | Bnc-PL3-Asp-DipA-B5-Asp-3COOHF-CyLeu-Ala-Phe-Lys*3-PyrS2-3Thi-34ClF-GlnR*3-NH2 |
| I-1716 | CF3CO-PL3-Asp-DipA-B5-Asp-3COOHF-CyLeu-Ala-Phe-Lys*3-PyrS2-3Thi-34ClF-GlnR*3-NH2 |
| I-1717 | 6QuiAc-PL3-Asp-DipA-B5-Asp-3COOHF-CyLeu-Ala-Phe-Lys*3-PyrS2-3Thi-34ClF-GlnR*3-NH2 |
| I-1718 | 124TriAc-PL3-Asp-DipA-B5-Asp-3COOHF-CyLeu-Ala-Phe-Lys*3-PyrS2-3Thi-34ClF-GlnR*3- |
| | NH2 |
| I-1719 | 5PymAc-PL3-Asp-DipA-B5-Asp-3COOHF-CyLeu-Ala-Phe-Lys*3-PyrS2-3Thi-34ClF-GlnR*3- |
| | NH2 |
| I-1720 | 2PyCypCO-PL3-Asp-DipA-B5-Asp-3COOHF-CyLeu-Ala-Phe-Lys*3-PyrS2-3Thi-34ClF-GlnR*3- |
| | NH2 |
| I-1721 | 2PyBu-PL3-Asp-DipA-B5-Asp-3COOHF-CyLeu-Ala-Phe-Lys*3-PyrS2-3Thi-34ClF-GlnR*3-NH2 |
| I-1722 | 2PyzCO-PL3-Asp-DipA-B5-Asp-3COOHF-CyLeu-Ala-Phe-Lys*3-PyrS2-3Thi-34ClF-GlnR*3- |
| | NH2 |
| I-1723 | Bua-PL3-Asn-DipA-B5-Asp-3COOHF-CyLeu-Ala-Phe-Lys*3-PyrS2-3Thi-34ClF-GlnR*3-NH2 |
| I-1724 | Isovalery1-PL3-Asn-DipA-B5-Asp-3COOHF-CyLeu-Ala-Phe-Lys*3-PyrS2-3Thi-34ClF-GlnR*3- |
| | NH2 |
| I-1725 | Cpc-PL3-Asn-DipA-B5-Asp-3COOHF-CyLeu-Ala-Phe-Lys*3-PyrS2-3Thi-34ClF-GlnR*3-NH2 |
| I-1726 | Cbc-PL3-Asn-DipA-B5-Asp-3COOHF-CyLeu-Ala-Phe-Lys*3-PyrS2-3Thi-34ClF-GlnR*3-NH2 |
| I-1727 | CypCO-PL3-Asn-DipA-B5-Asp-3COOHF-CyLeu-Ala-Phe-Lys*3-PyrS2-3Thi-34ClF-GlnR*3-NH2 |
| I-1728 | Bnc-PL3-Asn-DipA-B5-Asp-3COOHF-CyLeu-Ala-Phe-Lys*3-PyrS2-3Thi-34ClF-GlnR*3-NH2 |
| I-1729 | CF3CO-PL3-Asn-DipA-B5-Asp-3COOHF-CyLeu-Ala-Phe-Lys*3-PyrS2-3Thi-34ClF-GlnR*3-NH2 |
| I-1730 | 6QuiAc-PL3-Asn-DipA-B5-Asp-3COOHF-CyLeu-Ala-Phe-Lys*3-PyrS2-3Thi-34ClF-GlnR*3-NH2 |
| I-1731 | 124TriAc-PL3-Asn-DipA-B5-Asp-3COOHF-CyLeu-Ala-Phe-Lys*3-PyrS2-3Thi-34ClF-GlnR*3- |
| | NH2 |
| I-1732 | 2PyCypCO-PL3-Asn-DipA-B5-Asp-3COOHF-CyLeu-Ala-Phe-Lys*3-PyrS2-3Thi-34ClF-GlnR*3- |
| | NH2 |
| I-1733 | 2PyBu-PL3-Asn-DipA-B5-Asp-3COOHF-CyLeu-Ala-Phe-Lys*3-PyrS2-3Thi-34ClF-GlnR*3-NH2 |
| I-1734 | 2PyzCO-PL3-Asn-DipA-B5-Asp-3COOHF-CyLeu-Ala-Phe-Lys*3-PyrS2-3Thi-34ClF-GlnR*3- |
| | NH2 |
| I-1735 | Ac-PL3-Asp-Npg-B5-Asp-3COOHF-Aib-Ala-Phe-Lys*3-PyrS2-2NH2F-BztA-GlnR*3-Ala-NH2 |
| I-1736 | Ac-PL3-Asp-Npg-B5-Asp-3COOHF-Aib-Ala-Phe-Lys*3-PyrS2-2NH2F-BztA-GlnR*3-Ala-NH2 |
| I-1737 | Ac-PL3-Asp-Npg-B5-Asp-3COOHF-Aib-Ala-Phe-Lys*3-PyrS2-[124TriAc]2NH2F-BztA-GlnR*3- |
| | Ala-NH2 |
| I-1738 | Ac-PL3-Asp-Npg-B5-Asp-3COOHF-Aib-Ala-Phe-Lys*3-PyrS2-[124TriPr]2NH2F-BztA-GlnR*3- |
| | Ala-NH2 |
| I-1739 | Ac-PL3-Asp-Npg-B5-Asp-3COOHF-Aib-Ala-Phe-Lys*3-PyrS2-[6QuiAc]2NH2F-BztA-GlnR*3- |
| | Ala-NH2 |
| I-1740 | Ac-PL3-Asp-Npg-B5-Asp-3COOHF-Aib-Ala-Phe-Lys*3-PyrS2-[2PyAc]2NH2F-BztA-GlnR*3- |
| | Ala-NH2 |
| I-1741 | Ac-PL3-Asp-Npg-B5-Asp-3COOHF-Aib-Ala-Phe-Lys*3-PyrS2-[2PyPrpc]2NH2F-BztA-GlnR*3- |
| | Ala-NH2 |
| I-1742 | Ac-PL3-Asp-Npg-B5-Asp-3COOHF-Aib-Ala-Phe-Lys*3-PyrS2-[3PyPrpc]2NH2F-BztA-GlnR*3- |
| | Ala-NH2 |
| I-1743 | Ac-PL3-Asp-Npg-B5-Asp-3COOHF-Aib-Ala-Phe-Lys*3-PyrS2-[4PyPrpc]2NH2F-BztA-GlnR*3- |
| | Ala-NH2 |
| I-1744 | Ac-PL3-Asp-Npg-B5-Asp-3COOHF-Aib-Ala-Phe-Lys*3-PyrS2-[MeOPr]2NH2F-BztA-GlnR*3- |
| | Ala-NH2 |
| I-1745 | Ac-PL3-Asp-Npg-B5-Asp-3COOHF-Aib-Ala-Phe-Lys*3-PyrS2-[PhOPr]2NH2F-BztA-GlnR*3- |
| | Ala-NH2 |
| I-1746 | Ac-PL3-Asp-Npg-B5-Asp-3COOHF-Aib-Ala-Phe-Lys*3-PyrS2-[Me2MeOPr]2NH2F-BztA- |
| | GlnR*3-Ala-NH2 |
| I-1747 | Ac-PL3-Asp-Npg-B5-Asp-3COOHF-Aib-Ala-Phe-Lys*3-PyrS2-[Me2NAc]2NH2F-BztA-GlnR*3- |
| | Ala-NH2 |
| I-1748 | Ac-PL3-Asp-Npg-B5-Asp-3COOHF-Aib-Ala-Phe-Lys*3-PyrS2-[Me2NAc]2NH2F-BztA-GlnR*3- |
| | Ala-NH2 |
| I-1749 | Ac-PL3-Asp-Npg-B5-Asp-3COOHF-Aib-Ala-Phe-Lys*3-PyrS2-[Me2NPr]2NH2F-BztA-GlnR*3- |
| | Ala-NH2 |
| I-1750 | Ac-PL3-Asp-Npg-B5-Asp-3COOHF-Aib-Ala-Phe-Lys*3-PyrS2-[NdiMeButC]2NH2F-BztA- |
| | GlnR*3-Ala-NH2 |
| I-1751 | Ac-PL3-Asp-Npg-B5-Asp-3COOHF-Aib-Ala-Phe-Lys*3-PyrS2-[3IAPAc]2NH2F-BztA-GlnR*3- |
| | Ala-NH2 |
| I-1752 | Ac-PL3-Asp-Npg-B5-Asp-3COOHF-Aib-Ala-Phe-Lys*3-PyrS2-[15PyraPy]2NH2F-BztA-GlnR*3- |
| | Ala-NH2 |
| I-1753 | Ac-PL3-Asp-Npg-B5-Asp-3COOHF-Aib-Ala-Phe-Lys*3-PyrS2-[MorphAc]2NH2F-BztA-GlnR*3- |
| | Ala-NH2 |
| I-1754 | Ac-PL3-Asp-Npg-B5-Asp-3COOHF-Aib-Ala-Phe-Lys*3-PyrS2-[Nic]2NH2F-BztA-GlnR*3-Ala- |
| | NH2 |
| I-1755 | Ac-PL3-Asp-Npg-B5-Asp-3COOHF-Aib-Ala-Phe-Lys*3-PyrS2-[2PyzCO]2NH2F-BztA-GlnR*3- |
| | Ala-NH2 |
| I-1756 | Ac-PL3-Asp-Npg-B5-Asp-3COOHF-Aib-Ala-Phe-Lys*3-PyrS2-[5pymCO]2NH2F-BztA-GlnR*3- |
| | Ala-NH2 |
| I-1757 | Ac-PL3-Asp-Ile-B5-Asp-3COOHF-Aib-Ala-Phe-Lys*3-PyrS2-Phe-34ClF-dGlnR*3-NH2 |
| I-1758 | Ac-PL3-Asp-Ile-B5-Asp-3COOHF-Aib-Ala-Phe-Lys*3-PyrS2-Phe-34ClF-dGlnR*3-NHMe |
| I-1759 | Ac-PL3-Asp-Ile-B5-Asp-3COOHF-Aib-Ala-Phe-Lys*3-PyrS2-Phe-34ClF-dGlnR*3-Ala-NH2 |
| I-1760 | Ac-PL3-Asp-Ile-B5-Asp-3COOHF-Aib-Ala-Phe-1MeK*3-PyrS2-Phe-34ClF-dGlnR*3-NH2 |
| I-1761 | Ac-PL3-Asp-Ile-B5-Asp-3COOHF-Aib-Ala-Phe-1MeK*3-PyrS2-Phe-34ClF-dGlnR*3-NHMe |
| I-1762 | Ac-PL3-Asp-Ile-B5-Asp-3COOHF-Aib-Ala-Phe-1MeK*3-PyrS2-Phe-34ClF-dGlnR*3-Ala-NH2 |
| I-1763 | Ac-PL3-Asp-Npg-B5-Asp-3COOHF-Aib-Ala-Phe-Lys*3-PyrS2-[3FPyr2c]2NH2F-BztA-GlnR*3- |
| | Ala-NH2 |
| I-1764 | Ac-PL3-Asp-Npg-B5-Asp-3COOHF-Aib-Ala-Phe-Lys*3-PyrS2-[4FPyr3c]2NH2F-BztA-GlnR*3- |
| | Ala-NH2 |
| I-1765 | Ac-PL3-Asp-Npg-B5-Asp-3COOHF-Aib-Ala-Phe-Lys*3-PyrS2-[4FPyr3c]2NH2F-BztA-GlnR*3- |
| | Ala-NH2 |
| I-1766 | Ac-PL3-Asp-DipA-B5-Asp-3COOHF-CyLeu-Ala-Phe-Lys*3-PyrS2-2F3MeF-BztA-GlnR*3-NH2 |
| I-1767 | Ac-PL3-Asp-DipA-B5-Asp-3COOHF-CyLeu-Ala-Phe-Lys*3-PyrS2-2F3MeF-34ClF-GlnR*3-Pro- |
| | NH2 |
| I-1768 | Ac-PL3-Asp-DipA-B5-Asp-3COOHF-CyLeu-Ala-Phe-Lys*3-PyrS2-2F3MeF-BztA-GlnR*3-Pro- |
| | NH2 |
| I-1769 | Ac-PL3-Asp-DipA-B5-Asp-3COOHF-CyLeu-Ala-Phe-Lys*3-PyrS2-2F3MeF-34ClF-GlnR*3-Leu- |
| | NH2 |
| I-1770 | Ac-PL3-Asp-DipA-B5-Asp-3COOHF-CyLeu-Ala-Phe-Lys*3-PyrS2-2F3MeF-BztA-GlnR*3-Leu- |
| | NH2 |
| I-1771 | Ac-PL3-Asp-DipA-B5-Asp-3COOHF-CyLeu-Ala-Phe-Lys*3-PyrS2-2F3MeF-34ClF-GlnR*3-Ser- |
| | NH2 |
| I-1772 | Ac-PL3-Asp-DipA-B5-Asp-3COOHF-CyLeu-Ala-Phe-Lys*3-PyrS2-2F3MeF-BztA-GlnR*3-Ser- |
| | NH2 |
| I-1773 | Ac-PL3-Asp-DipA-B5-Asp-3COOHF-CyLeu-Ala-Phe-Lys*3-PyrS2-2F3MeF-34ClF-GlnR*3-Val- |
| | NH2 |
| I-1774 | Ac-PL3-Asp-DipA-B5-Asp-3COOHF-CyLeu-Ala-Phe-Lys*3-PyrS2-2F3MeF-BztA-GlnR*3-Val- |
| | NH2 |
| I-1775 | Ac-PL3-Asp-DipA-B5-Asp-3COOHF-CyLeu-Ala-Phe-Lys*3-PyrS2-2F3MeF-BztA-GlnR*3-Val- |
| | NH2 |
| I-1776 | Ac-PL3-Asp-DipA-B5-Asp-3COOHF-CyLeu-Ala-Phe-Lys*3-PyrS2-2F3MeF-34ClF-GlnR*3-Phe- |
| | NH2 |
| I-1777 | Ac-PL3-Asp-DipA-B5-Asp-3COOHF-CyLeu-Ala-Phe-Lys*3-PyrS2-2F3MeF-BztA-GlnR*3-Phe- |
| | NH2 |
| I-1778 | Ac-PL3-Asp-Ile-B5-Asp-3COOHF-Aib-Ala-Phe-GlnR*3-PyrS2-Phe-34ClF-dLys*3-Ala-NH2 |
| I-1779 | Ac-PL3-Asp-Ile-B5-Asp-3COOHF-Aib-Ala-Phe-Orn*3-PyrS2-Phe-34ClF-dGlnR*3-NH2 |
| I-1780 | Ac-PL3-Asp-Ile-B5-Asp-3COOHF-Aib-Ala-Phe-Orn*3-PyrS2-Phe-34ClF-dGlnR*3-NH2 |
| I-1781 | Ac-PL3-Asp-Ile-B5-Asp-3COOHF-Aib-Ala-Phe-Orn*3-PyrS2-Phe-34ClF-dGlnR*3-NHMe |
| I-1782 | Ac-PL3-Asp-Ile-B5-Asp-3COOHF-Aib-Ala-Phe-Orn*3-PyrS2-Phe-34ClF-dGlnR*3-Ala-NH2 |
| I-1783 | Ac-S6-Val-Asp-DipA-B5-Asp-3COOHF-Aib-Ala-Phe-Lys*3-PyrS1-Phe-34ClF-GlnR*3-NH2 |
| I-1784 | Ac-S5-Glu-Asp-DipA-B5-Asp-3COOHF-Aib-Ala-Phe-Lys*3-PyrS1-Phe-34ClF-GlnR*3-NH2 |
| I-1785 | Ac-S5-Leu-Asp-DipA-B5-Asp-3COOHF-Aib-Ala-Phe-Lys*3-PyrS1-Phe-34ClF-GlnR*3-NH2 |
| I-1786 | Ac-PL3-Asp-Ile-B5-Asp-Me2Gln-Aib-Ala-Phe-Lys*3-PyrS2-Phe-34ClF-GlnR*3-Ala-NH2 |
| I-1787 | Ac-PL3-Asp-DipA-B5-Asp-3COOHF-Ala-Ala-Phe-Lys*3-PyrS2-3Thi-34ClF-GlnR*3-Ala-Ala- |
| | [Ac-dPEG2]-Lys-NH2-NH2 |
| I-1788 | Ac-PL3-Asp-DipA-B5-Asp-3COOHF-Ala-Ala-Phe-Lys*3-PyrS2-3Thi-34ClF-GlnR*3-Ala-Ala- |
| | [Ac-PEG8]-Lys-NH2-NH2 |
| I-1789 | Ac-PL3-Asp-DipA-B5-Asp-3COOHF-Ala-Ala-Phe-Lys*3-PyrS2-3Thi-34ClF-GlnR*3-Ala-Ala- |
| | [Oct-dPEG2]-Lys-NH2-NH2 |
| I-1790 | Ac-PL3-Asp-DipA-B5-Asp-3COOHF-Ala-Ala-Phe-Lys*3-PyrS2-3Thi-34ClF-GlnR*3-Ala-Ala- |
| | [Oct-PEG8]-Lys-NH2-NH2 |
| I-1791 | Ac-PL3-Asp-DipA-B5-Asp-3COOHF-Ala-Ala-Phe-Lys*3-PyrS2-3Thi-34ClF-GlnR*3-Ala-Ala- |
| | [C18-dPEG2]-Lys-NH2-NH2 |
| I-1792 | Ac-PL3-Asp-DipA-B5-Asp-3COOHF-Ala-Ala-Phe-Lys*3-PyrS2-3Thi-34ClF-GlnR*3-Ala-Ala- |
| | [C18-PEG8]-Lys-NH2-NH2 |
| I-1793 | Ac-PL3-Asp-Ile-B5-Asp-3COOHF-GlnPDA*3-Ala-Phe-Leu-PyrS2-Phe-34ClF-GlnR*3-NH2 |
| I-1794 | Ac-PL3-Asp-Ile-B5-Asp-3COOHF-GlnPDA*3-Ala-Phe-Ala-PyrS2-Phe-34ClF-GlnR*3-NH2 |
| I-1795 | Ac-PL3-Asp-Ile-B5-Asp-3COOHF-GlnPDA*3-Ala-Phe-Val-PyrS2-Phe-34ClF-GlnR*3-NH2 |
| I-1796 | Ac-PL3-Asp-Ile-B5-Asp-3COOHF-GlnBDA*3-Ala-Phe-Leu-PyrS2-Phe-34ClF-GlnR*3-NH2 |
| I-1797 | Ac-PL3-Asp-Ile-B5-Asp-3COOHF-GlnBDA*3-Ala-Phe-Ala-PyrS2-Phe-34ClF-GlnR*3-NH2 |
| I-1798 | Ac-PL3-Asp-Ile-B5-Asp-3COOHF-GlnBDA*3-Ala-Phe-Val-PyrS2-Phe-34ClF-GlnR*3-NH2 |
| I-1799 | Ac-PL3-Asp-Ile-B5-Asp-3COOHF-GlnMePDA*3-Ala-Phe-Leu-PyrS2-Phe-34ClF-GlnR*3-NH2 |
| I-1800 | Ac-PL3-Asp-Ile-B5-Asp-3COOHF-GlnMePDA*3-Ala-Phe-Ala-PyrS2-Phe-34ClF-GlnR*3-NH2 |
| I-1801 | Ac-PL3-Asp-Ile-B5-Asp-3COOHF-GlnMePDA*3-Ala-Phe-Val-PyrS2-Phe-34ClF-GlnR*3-NH2 |
| I-1802 | Ac-PL3-Asp-Ile-B5-Asp-3COOHF-GlnR*3-Ala-Phe-Leu-PyrS2-Phe-34ClF-GlnMePDA*3-NH2 |
| I-1803 | Ac-PL3-Asp-Ile-B5-Asp-3COOHF-GlnR*3-Ala-Phe-Ala-PyrS2-Phe-34ClF-GlnMePDA*3-NH2 |
| I-1804 | Ac-PL3-Asp-Ile-B5-Asp-3COOHF-GlnR*3-Ala-Phe-Val-PyrS2-Phe-34ClF-GlnMePDA*3-NH2 |
| I-1805 | Ac-S5-TfeGA-Asp-DipA-B5-Asp-3COOHF-Aib-Ala-Phe-Lys*3-PyrS1-Phe-34ClF-GlnR*3-NH2 |
| I-1806 | Ac-S5-3COOHF-Asp-DipA-B5-Asp-3COOHF-Aib-Ala-Phe-Lys*3-PyrS1-Phe-34ClF-GlnR*3-NH2 |
| I-1807 | Ac-S5-Thr-Asp-DipA-B5-Asp-3COOHF-Aib-Ala-Phe-Lys*3-PyrS1-Phe-34ClF-GlnR*3-NH2 |
| I-1808 | Ac-S5-Phe-Asp-DipA-B5-Asp-3COOHF-Aib-Ala-Phe-Lys*3-PyrS1-Phe-34ClF-GlnR*3-NH2 |
| I-1809 | Ac-PL3-Asp-Npg-B5-Asp-3COOHF-Aib-Ala-Phe-TriAzLys*3-S3MePyrSc7-3Thi-BztA-sAla*3- |
| | Ala-NH2 |
| I-1810 | Ac-PL3-Asp-Npg-B5-Asp-3COOHF-Aib-Ala-Phe-TriAzLys*3-R3MePyrSc7-3Thi-BztA-sAla*3- |
| | Ala-NH2 |
| I-1811 | Ac-PL3-Asp-Ile-B5-Asp-3COOHF-GlnR*3-Ala-Phe-Ala-PyrS2-Phe-34ClF-GlnT4CyMe*3-NH2 |
| I-1812 | Ac-PL3-Asp-Npg-B5-Asp-3COOHF-Aib-Ala-Phe-TriAzLys*3-S3iPrPyrSc7-3Thi-BztA-sAla*3- |
| | Ala-NH2 |
| I-1813 | Ac-PL3-Asp-Npg-B5-Asp-3COOHF-Aib-Ala-Phe-TriAzLys*3-S3iPrPyrSc7-3Thi-BztA-sAla*3- |
| | Ala-NH2 |
| I-1814 | Ac-PL3-Asp-Npg-B5-Asp-3COOHF-Aib-Ala-Phe-TriAzLys*3-R3iPrPyrSc7-3Thi-BztA-sAla*3- |
| | Ala-NH2 |
| I-1815 | Ac-PL3-Asp-Npg-B5-Asp-3COOHF-Aib-Ala-Phe-Lys*3-PyrS2-3Thi-BztA-GlnR*3-Thr-Ala- |
| | [mPEG8]-Lys-NH2 |
| I-1816 | Ac-PL3-Asp-Npg-B5-Asp-3COOHF-Aib-Ala-Phe-Lys*3-PyrS2-3Thi-BztA-GlnR*3-Thr-Ala- |
| | [mPEG8]-Lys-NH2 |
| I-1817 | Ac-PL3-Asp-Npg-B5-Asp-3COOHF-Aib-Ala-Phe-Lys*3-PyrS2-3Thi-BztA-GlnR*3-Val-Glu- |
| | [mPEG8]-Lys-NH2 |
| I-1818 | Ac-PL3-Asp-Npg-B5-Asp-3COOHF-Aib-Ala-Phe-Lys*3-PyrS2-3Thi-BztA-GlnR*3-Val-Thr- |
| | [mPEG8]-Lys-NH2 |
| I-1819 | Ac-PL3-Asp-Npg-B5-Asp-3COOHF-Aib-Ala-Phe-Lys*3-PyrS2-3Thi-BztA-GlnR*3-Val-Thr- |
| | [mPEG8]-Lys-NH2 |
| I-1820 | Ac-PL3-Asp-Npg-B5-Asp-3COOHF-Aib-Ala-Phe-Lys*3-PyrS2-3Thi-BztA-GlnR*3-Leu-Ser- |
| | [mPEG8]-Lys-NH2 |
| I-1821 | Ac-PL3-Asp-Npg-B5-Asp-3COOHF-Aib-Ala-Phe-Lys*3-PyrS2-3Thi-BztA-GlnR*3-Leu-Ser- |
| | [mPEG8]-Lys-NH2 |
| I-1822 | Ac-PL3-Asp-Npg-B5-Asp-3COOHF-Aib-Ala-Phe-Lys*3-PyrS2-3Thi-BztA-GlnR*3-Aib-Ser- |
| | [mPEG8]-Lys-NH2 |
| I-1823 | Ac-PL3-Asp-Npg-B5-Asp-3COOHF-Aib-Ala-Phe-Lys*3-PyrS2-3Thi-BztA-GlnR*3-Aib-Ser- |
| | [mPEG8]-Lys-NH2 |
| I-1824 | Ac-PL3-Asp-Leu-B5-Asp-3COOHF-GlnMeBDA*3-Ala-Phe-Leu-PyrS2-Phe-34ClF-GlnR*3-NH2 |
| I-1825 | Ac-PL3-Asp-Leu-B5-Asp-3COOHF-GlnMeBDA*3-Ala-Phe-Ala-PyrS2-Phe-34ClF-GlnR*3-NH2 |
| I-1826 | Ac-PL3-Asp-Leu-B5-Asp-3COOHF-GlnMeBDA*3-Ala-Phe-Val-PyrS2-Phe-34ClF-GlnR*3-NH2 |
| I-1827 | Ac-PL3-Asp-Leu-B5-Asp-3COOHF-GlnR*3-Ala-Phe-Leu-PyrS2-Phe-34ClF-GlnMeBDA*3-NH2 |
| I-1828 | Ac-PL3-Asp-Leu-B5-Asp-3COOHF-GlnR*3-Ala-Phe-Ala-PyrS2-Phe-34ClF-GlnMeBDA*3-NH2 |
| I-1829 | Ac-PL3-Asp-Leu-B5-Asp-3COOHF-GlnR*3-Ala-Phe-Val-PyrS2-Phe-34ClF-GlnMeBDA*3-NH2 |
| I-1830 | Ac-PL3-Asp-Leu-B5-Asp-3COOHF-GlnR*3-Ala-Phe-Leu-PyrS2-Phe-34ClF-Gln5DA*3-NH2 |
| I-1831 | Ac-PL3-Asp-Leu-B5-Asp-3COOHF-GlnR*3-Ala-Phe-Ala-PyrS2-Phe-34ClF-Gln5DA*3-NH2 |
| I-1832 | Ac-PL3-Asp-Leu-B5-Asp-3COOHF-GlnR*3-Ala-Phe-Val-PyrS2-Phe-34ClF-Gln5DA*3-NH2 |
| I-1833 | Ac-PL3-Asp-Leu-B5-Asp-3COOHF-GlnR*3-Ala-Phe-Leu-PyrS2-Phe-34ClF-Gln6DA*3-NH2 |
| I-1834 | Ac-PL3-Asp-Leu-B5-Asp-3COOHF-GlnR*3-Ala-Phe-Ala-PyrS2-Phe-34ClF-Gln6DA*3-NH2 |
| I-1835 | Ac-PL3-Asp-Leu-B5-Asp-3COOHF-GlnR*3-Ala-Phe-Val-PyrS2-Phe-34ClF-Gln6DA*3-NH2 |
| I-1836 | Ac-PL3-Asp-Leu-B5-Asp-3COOHF-GlnT4CyMe*3-Ala-Phe-Leu-PyrS2-Phe-34ClF-GlnR*3-NH2 |
| I-1837 | Ac-PL3-Asp-Leu-B5-Asp-3COOHF-GlnT4CyMe*3-Ala-Phe-Val-PyrS2-Phe-34ClF-GlnR*3-NH2 |
| I-1838 | Ac-PL3-Asp-Leu-B5-Asp-3COOHF-GlnR*3-Ala-Phe-Leu-PyrS2-Phe-34ClF-GlnT4CyMe*3-NH2 |
| I-1839 | Ac-PL3-Asp-Leu-B5-Asp-3COOHF-GlnR*3-Ala-Phe-Ala-PyrS2-Phe-34ClF-GlnT4CyMe*3-NH2 |
| I-1840 | Ac-PL3-Asp-Leu-B5-Asp-3COOHF-GlnR*3-Ala-Phe-Val-PyrS2-Phe-34ClF-GlnT4CyMe*3-NH2 |
| I-1841 | Ac-PL3-Asp-DipA-B5-Asp-3COOHF-Ala-Ala-Phe-Lys*3-PyrS2-Phe-BztA-GlnR*3-NH2 |
| I-1842 | Ac-PL3-Asp-DipA-B5-Asp-3COOHF-Ala-Ala-Phe-Lys*3-PyrS2-Phe-BztA-GlnR*3-NH2 |
| I-1843 | Ac-PL3-Asp-DipA-B5-Asp-3COOHF-Ala-Ala-Phe-Lys*3-PyrS2-Phe-BztA-GlnR*3-Pro-NH2 |
| I-1844 | Ac-PL3-Asp-DipA-B5-Asp-3COOHF-Ala-Ala-Phe-Lys*3-PyrS2-Phe-BztA-GlnR*3-dPro-NH2 |
| I-1845 | Ac-PL3-Asp-DipA-B5-Asp-3COOHF-Ala-Ala-Phe-Lys*3-PyrS2-Phe-BztA-GlnR*3-dPro-NH2 |
| I-1846 | Ac-PL3-Asp-DipA-B5-Asp-3COOHF-Ala-Ala-Phe-Lys*3-PyrS2-Phe-BztA-GlnR*3-Ser-NH2 |
| I-1847 | Ac-PL3-Asp-DipA-B5-Asp-3COOHF-Ala-Ala-Phe-Lys*3-PyrS2-Phe-BztA-GlnR*3-Val-NH2 |
| I-1848 | Ac-PL3-Asp-DipA-B5-Asp-3COOHF-Ala-Ala-Phe-Lys*3-PyrS2-Phe-BztA-GlnR*3-dVal-NH2 |
| I-1849 | Ac-PL3-Asp-DipA-B5-Asp-3COOHF-Ala-Ala-Phe-Lys*3-PyrS2-Phe-BztA-GlnR*3-dVal-NH2 |
| I-1850 | Ac-PL3-Asp-DipA-B5-Asp-3COOHF-Leu-Ala-Phe-Lys*3-PyrS2-Phe-BztA-GlnR*3-NH2 |
| I-1851 | Ac-PL3-Asp-DipA-B5-Asp-3COOHF-Leu-Ala-Phe-Lys*3-PyrS2-Phe-BztA-GlnR*3-NH2 |
| I-1852 | Ac-PL3-Asp-DipA-B5-Asp-3COOHF-Val-Ala-Phe-Lys*3-PyrS2-Phe-BztA-GlnR*3-NH2 |
| I-1853 | Ac-PL3-Asp-DipA-B5-Asp-3COOHF-Thr-Ala-Phe-Lys*3-PyrS2-Phe-BztA-GlnR*3-NH2 |
| I-1854 | Ac-PL3-Asp-DipA-B5-Asp-3COOHF-Leu-Ala-Phe-Lys*3-PyrS2-Phe-BztA-GlnR*3-dPro-NH2 |
| I-1855 | Ac-PL3-Asp-DipA-B5-Asp-3COOHF-Val-Ala-Phe-Lys*3-PyrS2-Phe-BztA-GlnR*3-dPro-NH2 |
| I-1856 | Ac-PL3-Asp-DipA-B5-Asp-3COOHF-Thr-Ala-Phe-Lys*3-PyrS2-Phe-BztA-GlnR*3-dPro-NH2 |
| I-1857 | Ac-PL3-Asp-Ile-B5-Asp-3COOHF-Aib-Ala-Phe-sAla*3-PyrS2-Phe-34ClF-TriAzLys*3-NH2 |
| I-1858 | Ac-PL3-Asp-Ile-B5-Asp-3COOHF-Aib-Ala-Phe-TriAzLys*3-PyrS2-Phe-34ClF-sCH2S*3-NH2 |
| I-1859 | Ac-PL3-Asp-Ile-B5-Asp-3COOHF-Aib-Ala-Phe-sCH2S*3-PyrS2-Phe-34ClF-TriAzLys*3-NH2 |
| I-1860 | Ac-PL3-Asp-Ile-B5-Asp-3COOHF-Aib-Ala-Phe-TriAzOrn*3-PyrS2-Phe-34ClF-sCH2S*3-NH2 |
| I-1861 | Ac-PL3-Asp-Ile-B5-Asp-3COOHF-Aib-Ala-Phe-TriAzOrn*3-PyrS2-Phe-34ClF-sCH2S*3-NH2 |
| I-1862 | Ac-PL3-Asp-Ile-B5-Asp-3COOHF-Aib-Ala-Phe-sCH2S*3-PyrS2-Phe-34ClF-TriAzOrn*3-NH2 |
| I-1863 | Ac-PL3-Asp-Ile-B5-Asp-3COOHF-Ala-Ala-Phe-TriAzLys*3-PyrS2-Phe-34ClF-sAla*3-NH2 |
| I-1864 | Ac-PL3-Asp-Ile-B5-Asp-3COOHF-Ala-Ala-Phe-sAla*3-PyrS2-Phe-34ClF-TriAzLys*3-NH2 |
| I-1865 | Ac-PL3-Asp-Ile-B5-Asp-3COOHF-Ala-Ala-Phe-TriAzLys*3-PyrS2-Phe-34ClF-sCH2S*3-NH2 |
| I-1866 | Ac-PL3-Asp-Ile-B5-Asp-3COOHF-Ala-Ala-Phe-sCH2S*3-PyrS2-Phe-34ClF-TriAzLys*3-NH2 |
| I-1867 | Ac-PL3-Asp-Ile-B5-Asp-3COOHF-Ala-Ala-Phe-TriAzOrn*3-PyrS2-Phe-34ClF-sCH2S*3-NH2 |
| I-1868 | Ac-PL3-Asp-Ile-B5-Asp-3COOHF-Ala-Ala-Phe-TriAzOrn*3-PyrS2-Phe-34ClF-sCH2S*3-NH2 |
| I-1869 | Ac-PL3-Asp-Ile-B5-Asp-3COOHF-Ala-Ala-Phe-sCH2S*3-PyrS2-Phe-34ClF-TriAzOrn*3-NH2 |
| I-1870 | Ac-PL3-Asp-Ile-B5-Asp-3COOHF-Ala-Ala-Phe-sCH2S*3-PyrS2-Phe-34ClF-TriAzOrn*3-NH2 |
| I-1871 | Ac-S5-Asp-Asp-DipA-B5-Asp-3COOHF-Aib-Ala-Phe-Lys*3-PyrS1-3Thi-BztA-GlnR*3-NH2 |
| I-1872 | Ac-S5-Glu-Asp-DipA-B5-Asp-3COOHF-Aib-Ala-Phe-Lys*3-PyrS1-3Thi-BztA-GlnR*3-NH2 |
| I-1873 | Ac-S5-AcLys-Asp-DipA-B5-Asp-3COOHF-Aib-Ala-Phe-Lys*3-PyrS1-3Thi-BztA-GlnR*3-NH2 |
| I-1874 | Ac-S5-Leu-Asp-DipA-B5-Asp-3COOHF-Aib-Ala-Phe-Lys*3-PyrS1-3Thi-BztA-GlnR*3-NH2 |
| I-1875 | Ac-S5-3COOHF-Asp-DipA-B5-Asp-3COOHF-Aib-Ala-Phe-Lys*3-PyrS1-3Thi-BztA-GlnR*3-NH2 |
| I-1876 | Ac-S5-Ala-Asp-DipA-B5-Asp-3COOHF-Aib-Ala-Phe-Lys*3-PyrS1-3Thi-BztA-GlnR*3-NH2 |
| I-1877 | Ac-S5-Asp-Asp-Val-B5-Asp-3COOHF-Aib-Ala-Phe-Lys*3-PyrS1-3Thi-BztA-GlnR*3-NH2 |
| I-1878 | Ac-S5-Glu-Asp-Val-B5-Asp-3COOHF-Aib-Ala-Phe-Lys*3-PyrS1-3Thi-BztA-GlnR*3-NH2 |
| I-1879 | Ac-S5-AcLys-Asp-Val-B5-Asp-3COOHF-Aib-Ala-Phe-Lys*3-PyrS1-3Thi-BztA-GlnR*3-NH2 |
| I-1880 | Ac-S5-Leu-Asp-Val-B5-Asp-3COOHF-Aib-Ala-Phe-Lys*3-PyrS1-3Thi-BztA-GlnR*3-NH2 |
| I-1881 | Ac-S5-3COOHF-Asp-Val-B5-Asp-3COOHF-Aib-Ala-Phe-Lys*3-PyrS1-3Thi-BztA-GlnR*3-NH2 |
| I-1882 | Ac-S5-Ala-Asp-Val-B5-Asp-3COOHF-Aib-Ala-Phe-Lys*3-PyrS1-3Thi-BztA-GlnR*3-NH2 |
| I-1883 | Ac-Pro-S5-Ala-Asp-Leu-B5-Asp-3COOHF-Aib-Ala-Phe-Lys*3-PyrS1-Phe-34ClF-GlnR*3-NH2 |
| I-1884 | Ac-Pro-S5-Ala-Asp-Leu-B5-Asp-3COOHF-Aib-Ala-Phe-Lys*3-PyrS1-Phe-34ClF-GlnR*3-NH2 |
| I-1885 | Ac-Pro-S5-Glu-Asp-DipA-B5-Asp-3COOHF-Aib-Ala-Phe-Lys*3-PyrS1-Phe-34ClF-GlnR*3-NH2 |
| I-1886 | Ac-Pro-S5-Glu-Asp-Val-B5-Asp-3COOHF-Aib-Ala-Phe-Lys*3-PyrS1-Phe-34ClF-GlnR*3-NH2 |
| I-1887 | Ac-Pro-S5-Glu-Asp-Leu-B5-Asp-3COOHF-Aib-Ala-Phe-Lys*3-PyrS1-Phe-34ClF-GlnR*3-NH2 |
| I-1888 | Ac-Pro-S5-Ala-Asp-DipA-B5-Asp-3COOHF-Aib-Ala-Phe-Lys*3-PyrS1-Phe-34ClF-GlnR*3-NH2 |
| I-1889 | Ac-Pro-S5-Ala-Asp-Val-B5-Asp-3COOHF-Aib-Ala-Phe-Lys*3-PyrS1-Phe-34ClF-GlnR*3-NH2 |
| I-1890 | Ac-Pro-S5-Ala-Asp-DipA-B5-Asp-3COOHF-Aib-Ala-Phe-Lys*3-PyrS1-Phe-34ClF-GlnR*3-NH2 |
| I-1891 | Ac-Pro-S5-Val-Asp-Val-B5-Asp-3COOHF-Aib-Ala-Phe-Lys*3-PyrS1-Phe-34ClF-GlnR*3-NH2 |
| I-1892 | Ac-Pro-S5-Val-Asp-Leu-B5-Asp-3COOHF-Aib-Ala-Phe-Lys*3-PyrS1-Phe-34ClF-GlnR*3-NH2 |
| I-1893 | Ac-Pro-S5-Leu-Asp-DipA-B5-Asp-3COOHF-Aib-Ala-Phe-Lys*3-PyrS1-Phe-34ClF-GlnR*3-NH2 |
| I-1894 | Ac-Pro-S5-Leu-Asp-Val-B5-Asp-3COOHF-Aib-Ala-Phe-Lys*3-PyrS1-Phe-34ClF-GlnR*3-NH2 |
| I-1895 | Ac-Pro-S5-Leu-Asp-Leu-B5-Asp-3COOHF-Aib-Ala-Phe-Lys*3-PyrS1-Phe-34ClF-GlnR*3-NH2 |
| I-1896 | Ac-PL3-Asp-Leu-B5-Asp-3COOHF-GlnC4CyMe*3-Ala-Phe-Leu-PyrS2-Phe-34ClF-GlnR*3-NH2 |
| I-1897 | Ac-PL3-Asp-Leu-B5-Asp-3COOHF-GlnC4CyMe*3-Ala-Phe-Ala-PyrS2-Phe-34ClF-GlnR*3-NH2 |
| I-1898 | Ac-PL3-Asp-Leu-B5-Asp-3COOHF-GlnR*3-Ala-Phe-Leu-PyrS2-Phe-34ClF-GlnC4CyMe*3-NH2 |
| I-1899 | Ac-PL3-Asp-Leu-B5-Asp-3COOHF-GlnR*3-Ala-Phe-Ala-PyrS2-Phe-34ClF-GlnC4CyMe*3-NH2 |
| I-1900 | Ac-PL3-Asp-Leu-B5-Asp-3COOHF-Gln3ACPip*3-Ala-Phe-Ala-PyrS2-Phe-34ClF-GlnR*3-NH2 |
| I-1901 | Ac-PL3-Asp-Leu-B5-Asp-3COOHF-GlnR*3-Ala-Phe-Leu-PyrS2-Phe-34ClF-Gln3ACPip*3-NH2 |
| I-1902 | Ac-PL3-Asp-Leu-B5-Asp-3COOHF-GlnR*3-Ala-Phe-Ala-PyrS2-Phe-34ClF-Gln3ACPip*3-NH2 |
| I-1903 | Ac-PL3-Asp-Leu-B5-Asp-3COOHF-GlnPipAz*3-Ala-Phe-Leu-PyrS2-Phe-34ClF-GlnR*3-NH2 |
| I-1904 | Ac-PL3-Asp-Leu-B5-Asp-3COOHF-GlnPipAz*3-Ala-Phe-Ala-PyrS2-Phe-34ClF-GlnR*3-NH2 |
| I-1905 | Ac-PL3-Asp-Leu-B5-Asp-3COOHF-GlnR*3-Ala-Phe-Leu-PyrS2-Phe-34ClF-GlnPipAz*3-NH2 |
| I-1906 | Ac-PL3-Asp-Leu-B5-Asp-3COOHF-GlnR*3-Ala-Phe-Ala-PyrS2-Phe-34ClF-GlnPipAz*3-NH2 |
| I-1907 | Ac-PL3-Asp-Leu-B5-Asp-3COOHF-Aib-Ala-Phe-Lys*3-PyrS2-Phe-34ClF-GlnR*3-Ala-NH2 |
| I-1908 | Ac-PL3-Asp-Leu-B5-Asp-3COOHF-Aib-Ala-Phe-Lys*3-PyrS2-Trp-34ClF-GlnR*3-Ala-NH2 |
| I-1909 | Ac-PL3-Asp-Leu-B5-Asp-3COOHF-Aib-Ala-Phe-Lys*3-PyrS2-BztA-34ClF-GlnR*3-Ala-NH2 |
| I-1910 | Ac-PL3-Asp-Leu-B5-Asp-3COOHF-Aib-Ala-Phe-Lys*3-PyrS2-5ClW-34ClF-GlnR*3-Ala-NH2 |
| I-1911 | Ac-PL3-Asp-Leu-B5-Asp-3COOHF-Aib-Ala-Phe-Lys*3-PyrS2-6ClW-34ClF-GlnR*3-Ala-NH2 |
| I-1912 | Ac-PL3-Asp-Leu-B5-Asp-3COOHF-Aib-Ala-Phe-Lys*3-PyrS2-Phe-BztA-GlnR*3-Ala-NH2 |
| I-1913 | Ac-PL3-Asp-Leu-B5-Asp-3COOHF-Aib-Ala-Phe-Lys*3-PyrS2-Trp-BztA-GlnR*3-Ala-NH2 |
| I-1914 | Ac-PL3-Asp-Leu-B5-Asp-3COOHF-Aib-Ala-Phe-Lys*3-PyrS2-BztA-BztA-GlnR*3-Ala-NH2 |
| I-1915 | Ac-PL3-Asp-Leu-B5-Asp-3COOHF-Aib-Ala-Phe-Lys*3-PyrS2-5ClW-BztA-GlnR*3-Ala-NH2 |
| I-1916 | Ac-PL3-Asp-Leu-B5-Asp-3COOHF-Aib-Ala-Phe-Lys*3-PyrS2-6ClW-BztA-GlnR*3-Ala-NH2 |
| I-1917 | Ac-PL3-Asp-DipA-B5-Asp-3COOHF-Ala-Ala-Phe-Lys*3-PyrS2-3Thi-34ClF-GlnR*3-Ala-Ala- |
| | [AdamantC-dPEG2]-Lys-NH2 |
| I-1918 | Ac-PL3-Asp-DipA-B5-Asp-3COOHF-Ala-Ala-Phe-Lys*3-PyrS2-3Thi-34ClF-GlnR*3-Ala-Ala- |
| | [AdamantC-PEG8]--Lys-NH2 |
| I-1919 | Ac-PL3-Asp-DipA-B5-Asp-3COOHF-Ala-Ala-Phe-Lys*3-PyrS2-3Thi-34ClF-GlnR*3-Ala-Ala- |
| | [lithocholate-dPEG2]-Lys-NH2 |
| I-1920 | Ac-PL3-Asp-DipA-B5-Asp-3COOHF-Ala-Ala-Phe-Lys*3-PyrS2-3Thi-34ClF-GlnR*3-Ala-Ala- |
| | [lithocholate-PEG8]-Lys-NH2 |
| I-1921 | Ac-PL3-Asp-Leu-B5-Asp-3COOHF-Gln4Pippip*3-Ala-Phe-Leu-PyrS2-Phe-34ClF-GlnR*3-NH2 |
| I-1922 | Ac-PL3-Asp-Leu-B5-Asp-3COOHF-Gln4Pippip*3-Ala-Phe-Ala-PyrS2-Phe-34ClF-GlnR*3-NH2 |
| I-1923 | Ac-PL3-Asp-Leu-B5-Asp-3COOHF-GlnPip4AE*3-Ala-Phe-Ala-PyrS2-Phe-34ClF-GlnR*3-NH2 |
| I-1924 | Ac-PL3-Asp-Leu-B5-Asp-3COOHF-GlnR*3-Ala-Phe-Leu-PyrS2-Phe-34ClF-GlnPip4AE*3-NH2 |
| I-1925 | Ac-PL3-Asp-Leu-B5-Asp-3COOHF-GlnR*3-Ala-Phe-Val-PyrS2-Phe-34ClF-GlnPip4AE*3-NH2 |
| I-1926 | Ac-PL3-Asp-Leu-B5-Asp-3COOHF-GlnR*3-Ala-Phe-Ala-PyrS2-Phe-34ClF-GlnPip4AE*3-NH2 |
| I-1927 | Ac-S6-Glu-Asp-DipA-B5-Asp-3COOHF-Aib-Ala-Phe-Lys*3-PyrS1-Phe-34ClF-GlnR*3-NH2 |
| I-1928 | Ac-S6-Glu-Asp-DipA-B5-Asp-3COOHF-Aib-Ala-Phe-Lys*3-PyrS1-Phe-BztA-GlnR*3-NH2 |
| I-1929 | Ac-S6-Glu-Asp-DipA-B5-Asp-3COOHF-Aib-Ala-Phe-Lys*3-PyrS1-3Thi-BztA-GlnR*3-NH2 |
| I-1930 | Ac-S6-Glu-Asp-DipA-B5-Asp-3COOHF-Leu-Ala-Phe-Lys*3-PyrS1-Phe-34ClF-GlnR*3-NH2 |
| I-1931 | Ac-S6-Glu-Asp-DipA-B5-Asp-3COOHF-Leu-Ala-Phe-Lys*3-PyrS1-Phe-BztA-GlnR*3-NH2 |
| I-1932 | Ac-S6-Glu-Asp-DipA-B5-Asp-3COOHF-Leu-Ala-Phe-Lys*3-PyrS1-3Thi-BztA-GlnR*3-NH2 |
| I-1933 | Ac-S6-Glu-Asp-DipA-B5-Asp-3COOHF-Aib-Ala-Phe-Lys*3-PyrS1-Phe-34ClF-GlnR*3-Val-NH2 |
| I-1934 | Ac-S6-Glu-Asp-DipA-B5-Asp-3COOHF-Aib-Ala-Phe-Lys*3-PyrS1-3Thi-34ClF-GlnR*3-Val-NH2 |
| I-1935 | Ac-S5-Leu-Asp-Val-B5-Asp-3COOHF-Leu-Ala-Phe-Lys*3-PyrS1-3Thi-BztA-GlnR*3-NH2 |
| I-1936 | Ac-S5-Leu-Asp-Chg-B5-Asp-3COOHF-Leu-Ala-Phe-Lys*3-PyrS1-3Thi-BztA-GlnR*3-NH2 |
| I-1937 | Ac-S6-Leu-Asp-Val-B5-Asp-3COOHF-Leu-Ala-Phe-Lys*3-PyrS1-3Thi-BztA-GlnR*3-NH2 |
| I-1938 | Ac-S6-Leu-Asp-Val-B5-Asp-3COOHF-Aib-Ala-Phe-Lys*3-PyrS1-3Thi-BztA-GlnR*3-NH2 |
| I-1939 | Ac-S6-Leu-Asp-DipA-B5-Asp-3COOHF-Aib-Ala-Phe-Lys*3-PyrS1-3Thi-BztA-GlnR*3-NH2 |
| I-1940 | Ac-Pro-S6-Leu-Asp-Val-B5-Asp-3COOHF-Aib-Ala-Phe-Lys*3-PyrS1-3Thi-BztA-GlnR*3-NH2 |
| I-1941 | Ac-Pro-S6-Leu-Asp-Chg-B5-Asp-3COOHF-Aib-Ala-Phe-Lys*3-PyrS1-3Thi-BztA-GlnR*3-NH2 |

[1090] For agents described in the Tables, as described previously, in various embodiments N-terminal cap (N-Term) is connected via R₁ to the amino group (R₁) of the first amino acid (AA1). In some embodiments, a N-Term cap may be properly considered as part of AA1. From there, each carboxylate (R₂) of an amino acid is connected to the amino group (R₁) of the subsequent amino acid, until the carboxylate (R₂) of the final amino acid is connected to R₁ of a C-terminal group. For any amino acid that has a branch point (R₃) and a branching monomer is indicated in brackets, R₁ of the monomer in brackets is attached to R₃ of the amino acid. For the amino acid Dap, with two potential branch points (R₃ and R₄), if two branches are indicated, the R₁ of the first branch is connected to R₃, and R₁ of the second branch connected to R₄. For any pair of amino acids that terminate in a *3 designation, the Ra groups of each of those amino acids are linked to each other. Likewise, for any pair of amino acids that terminate in a **3 designation, the Ra groups of those amino acids are linked to each other. For any agent that contains a pair of branching amino acids with R₃ groups, and one contains a branching monomer that contains both R₁ and R₂ groups, then R₁ is attached to the branching amino acid adjacent to it in the sequence, and the R₂ group of the branching monomer is attached to R₃ of the amino acid with no branching monomer designated. For example, in various peptides that have one of Cys, hCys, Pen, or aMeC at position 10 and also one of Cys, hCys, Pen, or aMeC at position 14, and a branching group off of the amino acid residue 10, the R₁ of that branching group is tied to the R₃ of the amino acid residue at position 10, while the R₂ of that branching group is tied to the Ra of the amino acid residue at position 14. For any amino acid which has a branching amino acid containing R₃ and nothing attached to it by the above, then R₃=H. In various embodiments (e.g., agents described in Table E1, Table E2 and Table E3), PyrS2 is tied together with either R₄, R₅, R₆, or one arm of B5, and if PL3 is present, it is typically tied to the other arm of B5. In various embodiments, if a N-terminal group contains an olefin, it is tied to either AA3, or a branching group off of AA3. If a peptide has been reduced as indicated, then olefins have been hydrogenated to —CH₂—CH₂-after olefin metathesis; if it is indicated “C-term only”, then only the C-terminal side staple, e.g., in many cases PyrS2/R₅ olefin staple, has been hydrogenated to —CH₂—CH₂—. For peptides which have not been hydrogenated, two possible staple isomers can be generated for each olefin metathesis, leading to 2″ potential isomers (four if n=2). For peptides with the same description and different assigned numbers, these are separable isomers or compositions comprising one or more isomers. In various embodiments, for a peptide comprising an amino acid residue starting with “Dap7” or “DapAc7”, the olefin of that amino acid residue is tied together with one arm of B5 via olefin metathesis, while the R₃ group of that stapling amino acid residue is tied to the R₃ of another amino acid residue, e.g., GlnR*3 residue, elsewhere in the peptide. Special cases: For I-1484 and I-1485, PL3 is stapled to S5, while the R₅ residue is stapled to PyrS2.

[1091] In some embodiments, it was confirmed that various peptides, e.g., stapled peptides, comprising residues of amino acids described herein can provide higher affinity than reference peptides that comprise a reference amino acid, e.g., a natural amino acid such as Asp or Glu, but are otherwise identical.

### Example 3. Provided Technologies can Provide High Selectivity and Purity

[1092] Among other things, the present disclosure provides various technologies for preparing stapled peptides, including those comprising multiple staples. As described herein, in some embodiments, two or more staples are formed in one step. For example, in some embodiments, two or more staples are formed in a metathesis reaction. In some embodiments, all staples formed by metathesis are formed in a metathesis reaction. In some embodiments, each of such staples are formed through olefin metathesis of terminal olefins. In some embodiments, multiple staples are formed after full lengths of peptides have been achieved. In some embodiments, one or more staples comprising double bonds are formed after full lengths of peptides have been achieved. In some embodiments, all staples comprising double bonds are formed after full lengths of peptides have been achieved. In some embodiments, one or more staples formed through metathesis are formed after full lengths of peptides have been achieved. In some embodiments, all staples formed through metathesis are formed after full lengths of peptides have been achieved.

[1093] For example, in some embodiments, to prepare I-66 and I-67, a full length peptide (in some embodiments, prepared on solid phase as shown below) was subject to olefin metathesis:

[1094] In some embodiments, about 3:1 ratio (I-66: I-67) was observed.

[1095] In some embodiments, staples are formed in two or more staples. In some embodiments, two or more staples comprising olefin are formed in two or more steps. In some embodiments, two or more staples are formed in two or more metathesis steps. In some embodiments, two or more metathesis steps utilize different conditions, e.g., different catalysts. In some embodiments, each staple is formed in a separate step. In some embodiments, each staple comprising a double bond is formed in a separate step. In some embodiments, each staple comprising an olefin is formed in a separate step. In some embodiments, each staple formed by olefin metathesis is formed in a separate metathesis step. In some embodiments, stepwise stapling provides improved levels of selectivity to form a desired product (e.g., I-66) over other compounds, e.g., stereoisomers (e.g., for I-66, I-67). For example, in some embodiments, I-66 was prepared as described below, and over 10:1 I-66: I-67 ratio was observed. In some embodiments, the present disclosure provides a composition comprising I-66, wherein the ratio of I-66 to I-67 is about or at least about 5:1, 6:1, 7:1, 8:1, 9:1, 10:1, 15:1, 20:1, 25:1, 30:1, 40:1, 50:1, 60:1, 70:1, 80:1, 90:1, or 100:1. In some embodiments, the present disclosure provides a composition comprising I-66 and I-67, wherein the ratio of I-66 to I-67 is about or at least about 5:1, 6:1, 7:1, 8:1, 9:1, 10:1, 15:1, 20:1, 25:1, 30:1, 40:1, 50:1, 60:1, 70:1, 80:1, 90:1, or 100:1. In some embodiments, the ratio is about or at least about 5:1. In some embodiments, the ratio is about or at least about 10:1. In some embodiments, the ratio is about or at least about 20:1. In some embodiments, the ratio is about or at least about 30:1. In some embodiments, the ratio is about or at least about 50:1. In some embodiments, the ratio is about or at least about 80:1. In some embodiments, the ratio is about or at least about 90:1. In some embodiments, the ratio is about or at least about 100:1. In some embodiments, I-66 is provided in a salt form, e.g., a pharmaceutically acceptable salt form. In some embodiments, I-66 is provided in multiple forms including multiple salt forms. In some embodiments, I-67 is provided in a salt form, e.g., a pharmaceutically acceptable salt form. In some embodiments, I-67 is provided in multiple forms including multiple salt forms.

[1096] In a preparation, I-66 was synthesized by manual SPPS on Rink amide MBHA resin (98 g, 0.51 mmol/g loading, 50 mmol total). Deprotection steps were performed by treating the resin with 20% piperidine in DMF (v/v, 1000 mL) for thirty minutes with agitation via nitrogen bubbling. The resin was drained and washed with DMF four times. An amino acid to be coupled was dissolved in DMF (800 mL), and the coupling agent indicated below and either diisopropylethylamine (DIEA), or HOAt, were added in the equivalents listed below. Coupling proceeded for 30 minutes at room temperature with nitrogen bubbling, and the amino acid solution drained and the resin washed with DMF four times.

| Amino acid used | Coupling agent/base and amount used |
|---|---|
| Fmoc-Ala-OH (100 mmol) | HBTU (74 mmol), DIEA (75 mmol) |
| Fmoc-Glu(OAllyl)-OH (75 | DIC (75 mmol) and HOAt (75 mmol) |
| mmol) | |
| Fmoc-BztA-OH (65 mmol) | HBTU (61.5 mmol) and DIEA (65 mmol) |
| Fmoc-3Thi-OH (65 mmol) | HBTU (65 mmol) and DIEA (65 mmol) |
| Fmoc-PyrS2-OH (75 mmol) | HBTU (74 mmol), DIEA (75 mmol) |
| Fmoc-Lys(Alloc)-OH (100 | HATU (95 mmol) and DIEA (100 mmol) |
| mmol) | |
| Fmoc-Phe-OH (75 mmol) | HBTU (75 mmol), DIEA (75 mmol) |
| Fmoc-Ala-OH (90 mmol) | HBTU (85 mmol) and DIEA (90 mmol) |
| Fmoc-Aib-OH (100 mmol) | HBTU (95 mmol) and DIEA (100 mmol) |

[1097] After Aib addition, prior to Fmoc deprotection, the resin was washed with DMF five times, and dichloromethane five times. A solution of phenylsilane (54 g, 500 mmol) and tetrakis(triphenylphosphine) palladium (0) (5.77 g, 5 mmol) in dichloromethane (500 mL) was added. The reaction proceeded at room temperature for 15 minutes with nitrogen bubbling, and the palladium solution drained. The palladium/phenylsilane treatment was repeated another two times, then the resin drained and washed with DMF five times. The lactam was closed by treating the resin with HOAt (400 mmol) and DIC (400 mmol) in DMF (1000 mL), at room temperature with nitrogen bubbling for 2 h. The resin was drained and washed with DMF four times. The cycles of Fmoc deprotection and amino acid addition continued as above. A repeat coupling step was performed for Fmoc-Npg-OH.

| Amino acid used | Coupling agent/base and amount used |
|---|---|
| Fmoc-3COOHF(tBu)-OH | HATU (61.5 mmol), DIEA (65 mmol) |
| (65 mmol) | |
| Fmoc-Asp(tBu)-OH | HBTU (75 mmol) and DIEA (80 mmol) |
| (80 mmol) | |
| Fmoc-B5-OH (65 mmol) | HATU (61.5 mmol) and DIEA (65 mmol) |
| Fmoc-Npg-OH (75 mmol) | HATU (70 mmol) and DIEA (75 mmol) (×2) |
| (×2) | |
| Fmoc-Asp(tBu)-OH | HBTU (70 mmol) and DIEA (75 mmol) |
| (75 mmol) | |

[1098] After coupling Asp2, the B5/PyrS2 staple was closed by treating the resin with Hoveyda-Grubbs M720 catalyst (15.7 g, 25 mmol) and 1,4-benzoquinone (13.5 g, 125 mmol) in dichloroethane. The reaction proceeded at room temperature for 2 h with nitrogen bubbling, the catalyst was drained, and the treatment with M720 catalyst and 1,4-benzoquinone was repeated one more time before continuing with linear peptide synthesis.

| Amino acid/reagent used | Coupling agent/base and amount used |
|---|---|
| Fmoc-PL3-OH (75 mmol) | HBTU (75 mmol), DIC (75 mmol) |
| Ac2O (200 mmol) | DIEA (100 mmol) |

[1099] After N-terminal acetate capping, the PL3/B5 staple was closed by treating the resin with Grubbs catalyst M102 (20.6 g, 25 mmol) in dichloroethane at room temperature for 2 h with nitrogen bubbling. The catalyst solution was drained, and the treatment with Grubbs catalyst M102 was repeated another two times. The peptide was cleaved by treating the resin with 95:5 TFA: water (800 mL, v/v) for 2 hours, and the peptide was precipitated by pouring the cleavage cocktail into cold methyl tert-butyl ether. The precipitated peptide was filtered, washed with cold MTBE twice, and dried under vacuum. The peptide was first purified by dissolving in DMF, and loading onto a Luna C8 10 μm 100 Å column (flow rate: 20 mL/min) with a gradient of 45% to 75% acetonitrile in water (with 0.075% TFA) over 50 minutes. Product-containing fractions were dried, and the isolated peptide was subjected to a second purification, and was dissolved in 30% acetonitrile in water and loaded on a Kromasil C8 5 μm 100 Å column (20 mL/min), first flowing 0.4M ammonium acetate over the column for 25 min, then eluting with a gradient of 50% to 70% acetonitrile in water with 0.5% acetic acid over 50 minutes. The product-containing fractions were lyophilized to provide I-66 (40:1 I-66:1-67, 4997 mg, 2.41 mmol, 4.8% yield) plus a second lot of I-66 (8:1 I-66: I-67, 2015 mg, 0.97 mmol, 1.9% yield). Ratio of I-66 and I-67 were assessed using HPLC: Agilent Poroshell 120 EC-C18; 4.6×100 mm; solvent A=0.1% TFA in water; solvent B=0.075% TFA in acetonitrile; gradient is 10% B to 95% B over 30 min; detection is UV absorbance at 220 nM; and ratio is calculated based on peak area. As an example, in one run, retention time of I-66 is 15.3 min and retention time of I-67 is 16.2 min. In some embodiments, such a protocol provides improved resolution compared to a reference protocol by which I-66 and I-67 may elute as one peak or may otherwise not sufficiently separated. For example, by the general method for Table E2 1-66 and I-67 can be eluted together as the second peak and the mixture may be designated as I-67). Alternatively or additionally, ratios can also be assessed using other technologies, e.g., NMR. In some embodiments, such a preparation of I-66 or preparations corresponding thereto were assessed in various biological assays and was confirmed to possess various properties and activities; see, e.g., Examples 11-18. ¹H NMR of such a preparation of I-66 is presented in FIG. 6. Certain additional NMR data are presented in FIG. 9 to FIG. 18. As those skilled in the art reading the present disclosure will appreciate, NMR spectra such as those in FIG. 6 and FIG. 9 to FIG. 18 may contain peaks of certain impurities and/or residue 1H in a NMR solvent. In some embodiments, NOE was observed between the peaks at about 5.45-5.6 and at about 5.2-5.35. Fractions can be further purified to provide improved purity.

[1100] In some embodiments, I-66 and/or I-67 prepared herein may be utilized as standard/reference to assess and/or characterize other compounds and/or other preparations of I-66 and/or I-67 (e.g., different batches prepared by the same or different methods). In some embodiments, I-470 is similarly prepared. In some embodiments, I-470 differs from I-66 in that I-470 has Glu2 and Glu5 while I-66 has Asp2 and Asp5. A preparation of I-470 is prepared as described below. In a preparation, I-470 was synthesized by manual SPPS on Rink amide MBHA resin (25.5 g, 0.51 mmol/g loading, 13 mmol total). Deprotection steps were performed by treating the resin with 20% piperidine in DMF (v/v, 200 mL) for thirty minutes with agitation via nitrogen bubbling. The resin was drained, and washed with DMF four times. An amino acid to be coupled was dissolved in DMF (800 mL), and a coupling agent indicated below and either diisopropylethylamine (DIEA), or HOAt, were added in the equivalents listed below. Coupling proceeded for 30 minutes at room temperature with nitrogen bubbling, and the amino acid solution drained and the resin washed with DMF four times.

| Amino acid used | Coupling agent/base and amount used |
|---|---|
| Fmoc-Ala-OH (26 mmol) | HOAt (26 mmol) and DIC (26 mmol) |
| Fmoc-Glu(OAllyl)-OH (19.5 mmol) | HBTU (18.5 mmol) and DIEA (19.5 mmol) |
| Fmoc-BztA-OH (16.9 mmol) | HBTU (16 mmol) and DIEA (19.5 mmol) |
| Fmoc-3Thi-OH (16.9 mmol) | HBTU (18.5 mmol) and DIEA (19.5 mmol) |
| Fmoc-PyrS2-OH (19.5 mmol) | HOAt (19.5 mmol) and DIC (19.5 mmol) |
| Fmoc-Lys(Alloc)-OH (26 mmol) | HATU (24.7 mmol) and DIEA (26 mmol) |
| Fmoc-Phe-OH (26 mmol) | HATU (24.7 mmol) and DIEA (26 mmol) |
| Fmoc-Ala-OH (26 mmol) | HBTU (24.7 mmol) and DIEA (26 mmol) |
| Fmoc-Aib-OH (26 mmol) | HOAt (26 mmol) and DIC (26 mmol) |

[1101] After Aib addition, prior to Fmoc deprotection, the resin was washed with DMF five times, and dichloromethane five times. A solution of phenylsilane (14 g, 130 mmol) and tetrakis(triphenylphosphine) palladium (0) (1.5 g, 1.3 mmol) in dichloromethane (100 mL) was added. The reaction proceeded at room temperature for 15 minutes with nitrogen bubbling, and the palladium solution drained. The palladium/phenylsilane treatment was repeated another two times, then the resin drained and washed with DMF five times. The lactam was closed by treating the resin with HOAt (104 mmol) and DIC (104 mmol) in DMF (100 mL), at room temperature with nitrogen bubbling for 2 h. The resin was drained and washed with DMF four times. The cycles of Fmoc deprotection and amino acid addition continued as above. A repeat coupling step was performed for Fmoc-Npg-OH.

| Amino acid used | Coupling agent/base and amount used |
|---|---|
| Fmoc-3COOHF(tBu)-OH (26 mmol) | HBTU (24.7 mmol) and DIEA (26 mmol) |
| Fmoc-Glu(tBu)-OH (26 mmol) | HBTU (24.7 mmol) and DIEA (26 mmol) |
| Fmoc-B5-OH (16.9 mmol) | HATU (15.7 mmol) and DIEA (16.9 mmol) |
| Fmoc-Npg-OH (19.5 mmol) (×2) | HATU (18.2 mmol) and DIEA (26 mmol) (×2) |
| Fmoc-Glu(tBu)-OH (26 mmol) | HBTU (24.7 mmol) and DIEA (26 mmol) |
| Fmoc-PL3-OH (16.9 mmol) | HATU (15.7 mmol) and DIC (16.9 mmol) |
| Ac2O (52 mmol) | DIEA (26 mmol) |

[1102] After N-terminal acetate capping, both staples were closed simultaneously by treating the resin with Grubbs catalyst M102 (5.25 g, 6.5 mmol) in dichloroethane at room temperature for 2 h with nitrogen bubbling. The catalyst solution was drained, and the treatment with Grubbs catalyst M102 was repeated another two times. The peptide was cleaved by treating the resin with 95:5 TFA: water (200 mL, v/v) for 2 hours, and the peptide was precipitated by pouring the cleavage cocktail into cold methyl tert-butyl ether. The precipitated peptide was filtered, washed with cold MTBE twice, and dried under vacuum. The peptide was first purified by dissolving in DMF, and loading onto a Luna C8 10 μm 100 Å column (flow rate: 20 mL/min) with a gradient of 0% to 80% acetonitrile in water (with 0.075% TFA) over 50 minutes. Product-containing fractions were lyophilized to give I-470 as a 3:1 mixture (3.4 g, 1.63 mmol, 12.5% yield).

[1103] In some embodiments, a preparation of the present disclosure is a mixture of trans: cis olefin isomers at a staple. In some embodiments, a preparation of the present disclosure is a mixture of trans: cis olefin isomers at a staple, e.g., a B5/PyrS2 staple.

[1104] In some embodiments, the present disclosure provides a compound having the structure of

or a salt thereof. In some embodiments, the present disclosure provides a compound having the structure of

or a salt thereof. In some embodiments, the present disclosure provides a compound having the structure of

or a salt thereof. In some embodiments, the present disclosure provides a compound having the structure of

or a salt thereof. In some embodiments, a compound has the same retention time as I-66 prepared above under the same or comparable HPLC conditions. For example, in some embodiments, a HPLC condition is Agilent Poroshell 120 EC-C18; 4.6×100 mm; solvent A=0.1% TFA in water; solvent B=0.075% TFA in acetonitrile; gradient is 10% B to 95% B over 30 min; detection is UV absorbance at 220 nM; and a retention time of I-66 is about 15.3 min. In some embodiments, a HPLC condition separates I-66 and I-67. In some embodiments, when co-injected with a I-66 preparation described herein, the compound elute as a single peak as I-66.

[1105] In some embodiments, the compound is characterized in that in its ¹H NMR spectrum, it shows peaks that overlap with those between about 5.1-5.7 in FIG. 6. In some embodiments, the compound is characterized in that in its ¹H NMR spectrum, it has the same peak pattern as FIG. 6 between about 5.1-5.7. In some embodiments, the compound has the same NMR spectra as I-66 under the same or comparable conditions. In some embodiments, the compound has the same ¹H NMR spectra as I-66 under the same or comparable conditions, e.g., DMSO-d6, 373 K. Those skilled in the art appreciate that peaks of certain 1H, such as those bonded to nitrogen and oxygen, may shift in ¹H NMR for the same compound during different assessments. In some embodiments, the compound has such a structure that for its ¹H NMR, peaks of 1H bonded to carbon are found in FIG. 6 under the same or comparable conditions (DMSO-d6, 373 K). In some embodiments, the compound has such a structure that its ¹H NMR peaks are found in FIG. 6 under the same or comparable conditions (DMSO-d6, 373 K). In some embodiments, the compound has such a structure that its ¹H NMR peaks for 1H bonded to carbon atoms are found in FIG. 6 under the same or comparable conditions (DMSO-d6, 373 K). In some embodiments, integration of peak(s) in FIG. 6 that correspond(s) to each 1H bonded to carbon in the compound is independently about 1 (e.g., about 0.1, 0.2, 0.3, 0.4, 0.5, 0.6, 0.7, 0.8, 0.9 to about 1.1, 1.2, 1.3, 1.4, 1.5, 1.6, 1.7, 1.8, 1.9 or 2.0, about 0.2-1.8, about 0.5-1.5, about 0.7-1.5, 0.8-1.2, etc.) when integration of the triplet at about 5.45 to about 5.6 is set as 1. In some embodiments, integration of peak(s) in FIG. 6 that correspond(s) to each 1H in the compound is independently about 1 (e.g., about 0.1, 0.2, 0.3, 0.4, 0.5, 0.6, 0.7, 0.8, 0.9 to about 1.1, 1.2, 1.3, 1.4, 1.5, 1.6, 1.7, 1.8, 1.9 or 2.0, about 0.2-1.8, about 0.5-1.5, about 0.7-1.5, 0.8-1.2, etc.) when integration of the triplet at about 5.45 to about 5.6 is set as 1. An integration of FIG. 6 is presented in FIG. 7 as an example.

[1106] In some embodiments, the compound is characterized in that in its ¹H NMR spectrum, it shows peaks that overlap with those between about 5.1-5.7 in FIG. 9. In some embodiments, the compound is characterized in that in its ¹H NMR spectrum, it has the same peak pattern as FIG. 9 between about 5.1-5.7. In some embodiments, the compound has the same NMR spectra (e.g., one or more or all of FIG. 9, FIG. 10, FIG. 11, FIG. 12, FIG. 13, FIG. 14, FIG. 15, FIG. 16, FIG. 17, and FIG. 18) as I-66 under the same or comparable conditions, e.g., methanal-d4, 298 K. In some embodiments, the compound has the same ¹H NMR spectra (e.g., FIG. 9) as I-66 under the same or comparable conditions, e.g., methanal-d4, 298 K. In some embodiments, the compound has the same ¹³C NMR spectra (e.g., FIG. 12) as I-66 under the same or comparable conditions, e.g., methanal-d4, 298 K. In some embodiments, the compound has such a structure that for its ¹H NMR, peaks of 1H bonded to carbon are found in FIG. 9 under the same or comparable conditions (methanol-d4, 298 K). In some embodiments, the compound has such a structure that its ¹H NMR peaks are found in FIG. 9 under the same or comparable conditions (methanol-d4, 298 K). In some embodiments, the compound has such a structure that its ¹H NMR peaks for 1H bonded to carbon atoms are found in FIG. 9 under the same or comparable conditions (methanol-d4, 298 K). In some embodiments, the compound has such a structure that its ¹³C NMR peaks are found in FIG. 9 under the same or comparable conditions (methanol-d4, 298 K). In some embodiments, integration of peak(s) in FIG. 9 that correspond(s) to each 1H bonded to carbon in the compound is independently about 1 (e.g., about 0.1, 0.2, 0.3, 0.4, 0.5, 0.6, 0.7, 0.8, 0.9 to about 1.1, 1.2, 1.3, 1.4, 1.5, 1.6, 1.7, 1.8, 1.9 or 2.0, about 0.2-1.8, about 0.5-1.5, about 0.7-1.5, 0.8-1.2, etc.) when integration of the triplet at about 5.45 to about 5.6 is set as 1. In some embodiments, integration of peak(s) in FIG. 9 that correspond(s) to each 1H in the compound is independently about 1 (e.g., about 0.1, 0.2, 0.3, 0.4, 0.5, 0.6, 0.7, 0.8, 0.9 to about 1.1, 1.2, 1.3, 1.4, 1.5, 1.6, 1.7, 1.8, 1.9 or 2.0, about 0.2-1.8, about 0.5-1.5, about 0.7-1.5, 0.8-1.2, etc.) when integration of the triplet at about 5.45 to about 5.6 is set as 1. An integration of peaks in FIG. 9 is included in FIG. 9 as an example.

[1107] In some embodiments, ¹H NMR of a compound comprises the following peaks (or peaks corresponding to the following peaks) (methanol-d4, about 298K, about 900 MHz, chemical shift): 3.96, 6.34, 6.84, 6.36, 4.38, 4.31, 3.82, 4.21, 7.21, 7.24, 7.07, 7.24, 7.21, 4.03, 4.25, 7.97, 7.94, 7.42, 7.50, 4.40, 5.29, 5.31, 4.27, 4.31, 5.56, 5.36, 7.89, 7.38, 7.41, 7.89, 7.00, 4.30, 2.00, 2.10, 1.60, 1.65, 3.73, 4.15, 3.15, 4.22, 2.29, 2.41, 3.53, 3.25, 3.06, 2.95, 1.93, 2.38, 2.92, 3.45, 1.18, 1.36, 1.55, 1.84, 1.53, 3.27, 3.31, 3.27, 3.44, 2.74, 2.96, 1.92, 2.07, 1.37, 2.38, 1.80, 1.88, 2.71, 2.81, 3.20, 2.05, 1.97, 2.17, 0.84, 1.42, 1.57, 2.69, 3.76, 3.92, 2.20, 2.42, 2.22, 3.08, 3.40, 1.55, 1.07, 1.42, 1.59, 1.33, and 2.23. In some embodiments, chemical shifts of ¹H bonded to carbon of a compound are (methanol-d4, about 298K, about 900 MHz): 3.96, 6.34, 6.84, 6.36, 4.38, 4.31, 3.82, 4.21, 7.21, 7.24, 7.07, 7.24, 7.21, 4.03, 4.25, 7.97, 7.94, 7.42, 7.50, 4.40, 5.29, 5.31, 4.27, 4.31, 5.56, 5.36, 7.89, 7.38, 7.41, 7.89, 7.00, 4.30, 2.00, 2.10, 1.60, 1.65, 3.73, 4.15, 3.15, 4.22, 2.29, 2.41, 3.53, 3.25, 3.06, 2.95, 1.93, 2.38, 2.92, 3.45, 1.18, 1.36, 1.55, 1.84, 1.53, 3.27, 3.31, 3.27, 3.44, 2.74, 2.96, 1.92, 2.07, 1.37, 2.38, 1.80, 1.88, 2.71, 2.81, 3.20, 2.05, 1.97, 2.17, 0.84, 1.42, 1.57, 2.69, 3.76, 3.92, 2.20, 2.42, 2.22, 3.08, 3.40, 1.55, 1.07, 1.42, 1.59, 1.33, and 2.23. In some embodiments, 1H NMR of a compound comprises the following peaks (or peaks corresponding to the following peaks) (mcthanol-d4, about 298K, about 900 MHz, chemical shift): 8.32, 7.73, 8.17, 8.19, 8.25, 8.44, 8.89, 8.10, 8.42, 7.45, 7.39, 8.15, 8.86, and 7.69; in some embodiments, one or more or all such peaks independently correspond to 1H bonded to nitrogen and may shift or may not be present. In some embodiments, ¹³C NMR of a compound comprises the following peaks (or peaks corresponding to the following peaks) (methanol-d4, about 298K, about 226 MHz, chemical shift): 65.89, 137.36, 138.13, 57.28, 138.06, 132.12, 169.51, 62.78, 31.36, 70.51, 132.57, 139.58, 141.98, 156.51, 173.13, 175.55, 175.8, 174.47, 175.8, 177.56, 178.58, 174.39, 175.7, 177.0, 175.8, 175.44, 175.6, 176.97, 175.55, 178.08, 172.38, 59.94, 123.42, 125.19, 129.15, 56.93, 55.69, 57.70, 60.70, 130.39, 129.83, 128.08, 129.83, 130.39, 54.54, 60.94, 131.96, 129.37, 129.54, 135.08, 55.56, 131.26, 131.47, 56.48, 55.33, 129.2, 126.96, 122.71, 125.37, 125.20, 123.87, 126.99, 51.20, 29.99, 30.63, 67.18, 53.94, 31.81, 45.37, 32.60, 27.47, 33.84, 39.25, 23.2, 35.8, 29.61, 38.18, 38.10, 36.18, 30.00, 23.32, 33.8, 45.96, 35.69, 33.09, 27.46, 23.29, 35.96, 49.50, 24.46, 36.46, 31.76, 17.00, 30.18, 17.76, 28.98, 23.20, 23.87, 172.48, and 174.10. In some embodiments, chemical shifts of ¹³C of a compound are (methanol-d4, about 298K, about 226 MHz): 65.89, 137.36, 138.13, 57.28, 138.06, 132.12, 169.51, 62.78, 31.36, 70.51, 132.57, 139.58, 141.98, 156.51, 173.13, 175.55, 175.8, 174.47, 175.8, 177.56, 178.58, 174.39, 175.7, 177.0, 175.8, 175.44, 175.6, 176.97, 175.55, 178.08, 172.38, 59.94, 123.42, 125.19, 129.15, 56.93, 55.69, 57.70, 60.70, 130.39, 129.83, 128.08, 129.83, 130.39, 54.54, 60.94, 131.96, 129.37, 129.54, 135.08, 55.56, 131.26, 131.47, 56.48, 55.33, 129.2, 126.96, 122.71, 125.37, 125.20, 123.87, 126.99, 51.20, 29.99, 30.63, 67.18, 53.94, 31.81, 45.37, 32.60, 27.47, 33.84, 39.25, 23.2, 35.8, 29.61, 38.18, 38.10, 36.18, 30.00, 23.32, 33.8, 45.96, 35.69, 33.09, 27.46, 23.29, 35.96, 49.50, 24.46, 36.46, 31.76, 17.00, 30.18, 17.76, 28.98, 23.20, 23.87, 172.48, and 174.10. In some embodiments, for NMR performed in methanol-d4, the following chemical shift references are utilized: residual solvent protons: 3.31; solvent 13C: 49.00. In some embodiments, to collect NMR data, a preparation of I-66 was dissolved in methanol-d4, and NMR, e.g., 1H, 13C, COSY, TOCSY, NOESY, HSQC, HMBC, etc., data were acquired on an about 900 MHz instrument, e.g., a 900 MHz Bruker AVANCE III system with a cryoprobe. In some embodiments, sample concentration was about 10 mg/750 μL. In some embodiments, temperature is about 298 K. Certain results are presented in FIG. 9 to FIG. 18 as examples. In some embodiments, a strong NOE peak between the olefin protons of the PL3-B5 staple was observed. In some embodiments, this peak was stronger than the NOE peak between neighboring aromatic protons of 3Thi, and/or of the p and m protons in the phenyl group of Phe.

[1108] Those skilled in the art appreciate that NMR results such as ¹H NMR results (e.g., chemical shifts, integration of peaks, etc.), ¹³C NMR results, multidimensional (e.g., 2D) NMR results, etc., may have typical error ranges. In some embodiments, peaks corresponding to two or more 1H may overlap. In some embodiments, such peaks may be integrated together for assessment of numbers of 1H. In some embodiments, peaks corresponding to two or more 13C may overlap. In some embodiments, NMR of a preparation of I-66 described above are the same or comparable with or without the addition of the compound at a detectable level (e.g., the same amount of I-66) under the same or comparable conditions. In some embodiments, ¹H and/or ¹³C NMR of a preparation of I-66 described above are the same or comparable with or without the addition of the compound at a detectable level (e.g., the same amount of I-66, or about 0.1-10, 0.2-5, 0.5-2, 0.1, 0.2, 0.3, 0.4, 0.5, 0.6, 0.7, 0.8, 0.9, 1, 1.1, 1.2, 1.3, 1.4, 1.5, 2, 3, 4, 5, 6, 7, 8, 9, or 10, etc. of I-66). In some embodiments, ¹H NMR are considered the same or comparable when peaks corresponding to 1H bonded to carbon have comparable chemical shift, peak shapes and/or integration. In some embodiments, ¹³C NMR are considered the same or comparable when peaks have comparable chemical shift. In some embodiments, peaks from impurities and solvents are properly excluded when comparing NMR. In some embodiments, peaks from impurities, solvents, 1H bonded to oxygen, nitrogen, etc. are properly excluded when comparing NMR. Those skilled in the art appreciate that spectra may be properly considered to be the same if those skilled in the art can reasonably conclude that such spectra are comparable to each other and are of the same compound.

[1109] In some embodiments, a compound has the same retention time as I-67 prepared above under the same or comparable HPLC conditions. For example, in some embodiments, a HPLC condition is Agilent Poroshell 120 EC-C18; 4.6×100 mm; solvent A=0.1% TFA in water; solvent B=0.075% TFA in acetonitrile; gradient is 10% B to 95% B over 30 min; detection is UV absorbance at 220 nM; and a retention time of I-67 is about 16.2 min. In some embodiments, a HPLC condition separates I-66 and I-67. In some embodiments, when co-injected with a I-67 preparation described herein, the compound elute as a single peak as I-67. In some embodiments, the compound has the same ¹H NMR peaks between about 5.0-6.0 as I-67 under the same or comparable conditions. In some embodiments, the compound has the same NMR spectra as I-67 under the same or comparable conditions. In some embodiments, the compound has the same 1H NMR spectra as I-67 under the same or comparable conditions, e.g., DMSO-d6, 373 K. In some embodiments, NMR of a preparation of I-67 described above are the same or comparable with or without the addition of the compound at a detectable level (e.g., the same amount of 1-67) under the same or comparable conditions. In some embodiments, ¹H NMR of a preparation of I-67 described above are the same or comparable with or without the addition of the compound at a detectable level (e.g., the same amount of I-67). In some embodiments, in a composition comprising the compound, ratio of the compound to a stereoisomer of the compound is about or at least about 2:1, 3:1, 4:1, 5:1, 6:1, 7:1, 8:1, 9:1, 10:1, 15:1, 20:1, 25:1, 30:1, 40:1, 50:1, 60:1, 70:1, 80:1, 90:1, or 100:1. In some embodiments, in a composition comprising the compound, ratio of the compound to each stereoisomer of the compound is independently about or at least about 2:1, 3:1, 4:1, 5:1, 6:1, 7:1, 8:1, 9:1, 10:1, 15:1, 20:1, 25:1, 30:1, 40:1, 50:1, 60:1, 70:1, 80:1, 90:1, or 100:1. In some embodiments, in a composition comprising the compound, ratio of all compounds that are the compound or a salt thereof to all compounds that is a stereoisomer of the compound or a salt of the stereoisomer is about or at least about 2:1, 3:1, 4:1, 5:1, 6:1, 7:1, 8:1, 9:1, 10:1, 15:1, 20:1, 25:1, 30:1, 40:1, 50:1, 60:1, 70:1, 80:1, 90:1, or 100:1. In some embodiments, in a composition comprising the compound, for each stereoisomer of the compound, ratio of all compounds that are the compound or a salt thereof to all compounds that is a stereoisomer of the compound or a salt of the stereoisomer is about or at least about 2:1, 3:1, 4:1, 5:1, 6:1, 7:1, 8:1, 9:1, 10:1, 15:1, 20:1, 25:1, 30:1, 40:1, 50:1, 60:1, 70:1, 80:1, 90:1, or 100:1. In some embodiments, the ratio is about or at least about 2:1. In some embodiments, the ratio is about or at least about 3:1. In some embodiments, the ratio is about or at least about 4:1. In some embodiments, the ratio is about or at least about 5:1. In some embodiments, the ratio is about or at least about 10:1. In some embodiments, the ratio is about or at least about 20:1. In some embodiments, the ratio is about or at least about 30:1. In some embodiments, the ratio is about or at least about 50:1. In some embodiments, the ratio is about or at least about 80:1. In some embodiments, the ratio is about or at least about 90:1. In some embodiments, the ratio is about or at least about 100:1.

[1110] In some embodiments, a preparation of I-66 comprises

or a salt thereof. In some embodiments, a preparation of I-67 comprises

or a salt thereof. In some embodiments, a preparation of I-66 or a preparation of I-67 comprises a first compound

or a salt thereof, and a second compound

or a salt thereof. In some embodiments, in a preparation of I-66, ratio of the first compound to the second compound is about or at least about 2:1, 3:1, 5:1, 6:1, 7:1, 8:1, 9:1, 10:1, 15:1, 20:1, 25:1, 30:1, 40:1, 50:1, 60:1, 70:1, 80:1, 90:1, or 100:1. In some embodiments, in a preparation of I-66, ratio of all compounds that are the first compound or a salt thereof to all compounds that are the second compound or a salt thereof is about or at least about 2:1, 3:1, 5:1, 6:1, 7:1, 8:1, 9:1, 10:1, 15:1, 20:1, 25:1, 30:1, 40:1, 50:1, 60:1, 70:1, 80:1, 90:1, or 100:1. In some embodiments, in a preparation of I-67, ratio of the second compound to the first compound is about or at least about 2:1, 3:1, 5:1, 6:1, 7:1, 8:1, 9:1, 10:1, 15:1, 20:1, 25:1, 30:1, 40:1, 50:1, 60:1, 70:1, 80:1, 90:1, or 100:1. In some embodiments, in a preparation of I-67, ratio of all compounds that are the second compound or a salt thereof to all compounds that are the first compound or a salt thereof is about or at least about 2:1, 3:1, 4:1, 5:1, 6:1, 7:1, 8:1, 9:1, 10:1, 15:1, 20:1, 25:1, 30:1, 40:1, 50:1, 60:1, 70:1, 80:1, 90:1, or 100:1. In some embodiments, the ratio is about or at least about 2:1. In some embodiments, the ratio is about or at least about 3:1. In some embodiments, the ratio is about or at least about 4:1. In some embodiments, the ratio is about or at least about 5:1. In some embodiments, the ratio is about or at least about 10:1. In some embodiments, the ratio is about or at least about 20:1. In some embodiments, the ratio is about or at least about 30:1. In some embodiments, the ratio is about or at least about 50:1. In some embodiments, the ratio is about or at least about 80:1. In some embodiments, the ratio is about or at least about 90:1. In some embodiments, the ratio is about or at least about 100:1. As utilized in the present disclosure, depending on the context, in some embodiments, a ratio is a molar ratio; in some embodiments, a ratio is a weight ratio; in some embodiments, a ratio is a volume ratio; and in some embodiments, a ratio is according to an assessment. For example, in some embodiments, when ratio of compounds are assessed using HPLC/UV, a ratio is of peak area of UV trace at a certain wavelength, e.g., 220 nm.

### Example 4. Provided Technologies can Provide High Selectivity

[1111] As confirmed below, in some embodiments, the present disclosure provides technologies with high selectivity for forming staples comprising olefin double bonds.

[1112] Fmoc-azidolysine-PyrS2-3Thi-BztA-propargylglycine-Ala-protide resin was synthesized using standard solid phase peptide synthesis procedures. The triazole staple was closed by treating the resin with one equivalent of copper (I) iodide, one equivalent of sodium ascorbate, ten equivalents of diisopropylethylamine, and ten equivalents of 2,6-lutidine in dichloromethane at room temperature for 48 h. The resin was washed for 5 min with DCM 2X, MeOH 1X, H₂O 2X, 50% H₂O/MeOH 2X, and MeOH 2X. In some embodiments, it was observed there was a small layer of insoluble material floating on top of the reactor, which was eliminated by aspiration through a hose connected to a pump. Then, continued with washes with NMP 2X, DCM 1X, and MeOH 1X.

[1113] The cyclized product was elongated to Fmoc-Asp(OtBu)—Npg-B5-Asp(OtBu)-3COOHF(OtBu)-Aib-Ala-Phe-TriAzLys*3-PyrS2-3Thi-Bzta-sAla*3-Ala-protide resin using standard solid phase peptide synthesis procedures. Afterwards, the resin was thoroughly washed with DCM 2X, NMP 1X, DCM 2X, MeOH 2X, DCM 1X, MeOH 1X, each for five minutes, then dried under a flow of nitrogen for 24 h to yield a gold color resin. The first staple was closed by treating the resin with 5 mol % Hoveyda-Grubbs M720 catalyst (CAS 301224-40-8) and 10 mol % benzoquinone in dichloromethane at reflux for 48 h. After 48 h, the catalyst solution was drained, the resin washed with dichloromethane 3X, dried, and then treated again with 5 mol % Hoveyda-Grubbs M720 catalyst (CAS 301224-40-8) and 10 mol % benzoquinone in dichloromethane at reflux for 48 h.

[1114] After analysis by LCMS, complete reaction was observed with no identifiable starting material. The desired product is detected in >95%, no other isomer by-product is observed. Double bond configuration is assigned based on analysis of NMR data, reported selectivity, etc., and can also be assessed by other technologies, e.g., crystallography.

[1115] The above product was elongated to Ac-PL3-Asp(OtBu)-Npg-B5-Asp(OtBu)-3COOHF(OtBu)-Aib-Ala-Phe-TriAzLys*3-PyrS2-3Thi-Bzta-sAla*3-Ala-protide resin using standard solid phase peptide synthesis procedures. After acetyl capping of the N-terminus, the resin was thoroughly washed with DCM 2X, NMP 1X, DCM 2X, MeOH 2X, DCM 1X, MeOH 1X, each for five minutes, then dried under a flow of nitrogen for 24 h. The second staple was closed by treating the resin with 30 mol % Grubbs I M102 (CAS 172222-30-9) and 60 mol % benzoquinone in dichloromethane at reflux for 24 h. After 24 h, the catalyst solution was drained, the resin washed with dichloromethane 3X, dried, and then treated again with 30 mol % Grubbs I M102 (CAS 172222-30-9) and 60 mol % benzoquinone in dichloromethane at reflux for 24 h. The crude product was cleaved and deprotected, and was analyzed by LCMS and showed 82% (UV at, e.g., 210-400 nm) of I-335. Two more peaks of olefin isomers were detected on as 13% and 5% of total area by HPLC, respectively. Double bond configuration is assigned based on analysis of NMR data, reported selectivity, etc., and can also be assessed by other technologies, e.g., crystallography.

### Example 5. Provided Technologies can Provide Various Advantages

[1116] Among other things, provided technologies can provide various advantages. In some embodiments, provided technologies can provide improved target binding profiles and/or activity profiles. For example, various stapled peptides, e.g., I-66, can provide strong binding to beta-catenin and modulation of gene expression.

[1117] In some embodiments, it was confirmed, e.g., through biochemical competition assays, that provided technologies (e.g., I-66) can inhibit TCF/LEF transcription factor binding to beta-catenin. In some embodiments, it was observed that provided technologies (e.g., I-66) compete with TCF1, TCF3, TCF4, LEF1, pAPC, mouse ECAD, human ECAD, etc. for beta-catenin interactions. In some embodiments, it was confirmed that provided technologies (e.g., I-66) can significantly reduce phospho-APC binding. In some embodiments, it was confirmed that provided technologies (e.g., I-66) can significantly reduce E-cadherin binding. In some embodiments, it was observed that there was little to no competitive effect for certain provided technologies, e.g., I-66, for ICAT, Axin or Bcl9. In some embodiments, interactions are dependent on phosphorylation, e.g., it has been reported that E-cadherin binding to beta-catenin is highly dependent on phosphorylation of up to eight Ser residues on E-cadherin.

[1118] In some embodiments, capabilities of provided technologies, e.g., binding to beta-catenin and/or disrupt its interactions (or lack thereof) with various partners were assessed and confirmed in cells, e.g., using a NanoBRET based assay in HEK293 cells. In some embodiments, it was observed that provided technologies, e.g., I-66, can potently inhibit such interactions without affecting cell viability.

[1119] Among other things, direct inhibition of endogenous beta-catenin/TCF interaction was confirmed by co-immunoprecipitation (co-IP) assays as described herein.

[1120] Among other things, the present disclosure confirms that provided technologies can inhibit transcription of endogenous Wnt pathway target genes driven by the beta-catenin/TCF interaction. Among other things, it was confirmed that in DLDI cells, peptide A and I-66 dose-dependently inhibited the expression of AXIN2 and SP5, two bona fide downstream genes of beta-catenin/TCF (peptide A: AXIN2 IC₅₀=9.3 uM, SP5 IC₅₀=9 uM; I-66: AXIN2 IC₅₀=1.6 uM, SP5 IC₅₀=1.3 uM). In some embodiments, no effect was observed on the expression of CTNNB1 for peptide A and I-66 in DLD1 cells under a tested condition. Reduction of expression level of a canonical beta-catenin target AXIN2, was also observed in COLO320DM cells (peptide A: IC₅₀=1.4 uM; I-66: IC₅₀=0.3 uM) while I-470 had no or very little or non-significant effect.

[1121] Among other things, provided technologies can modulate transcription and levels of various transcripts, in some embodiments, with selectivity. For example, in some embodiments, provided technologies inhibit beta-catenin driven transcription selectively in HAP1 WT cells. Certain data are presented in FIG. 1 as examples. In some embodiments, treatment with an agent, e.g., I-66, did not affect beta-catenin protein levels.

[1122] In some embodiments, provided technologies can reduce level of beta-catenin in nuclei. In some embodiments, provided technologies can block beta-catenin nuclear localization. In some embodiments, provided technologies can reduce level of beta-catenin nuclear translocation. For example, as confirmed in FIG. 2, provided technologies can reduce levels of nuclear beta-catenin in various cells including COLO320DM cells (10 uM, 24 hr).

[1123] Among other things, provided technologies can inhibit proliferation of various cells including various cancer cells. In some embodiments, provided technologies modulate WNT specific transcription. In some embodiments, provided technologies induce cell cycle arrest. In some embodiments, provided technologies induce G1 cell cycle arrest. In some embodiments, provided technologies increased proportion of cells in G1 phase of cell cycle. As confirmed in FIG. 3, provided technologies can inhibit proliferation of COLO320DM, which is a colorectal cell line comprising various mutations such as APC, TP53, etc., modulate WNT specific transcription such as of AXIN2 and CXCL12, and induce G1 cell cycle arrest. In some embodiments, it was confirmed that provided technologies can reduce proportion of cells in S phase of cell cycle. In some embodiments, it was confirmed that provided technologies can significantly down-regulate Cyclin D2 and up-regulate p27. In some embodiments, changes of various genes, e.g., AXIN2, CXCL12, etc., were observed to be consistent with changes with shRNA-knockdown.

[1124] As described herein, provided technologies are useful for treating various conditions, disorders or diseases including cancer. Among other things, it was confirmed that provided technologies can provide in vivo efficacy as demonstrated in various animal models. Certain useful models and/or protocols are described below as examples. Those skilled in the art reading the present disclosure appreciate that various models for various cancers may be utilized to assess provided technologies and confirm their effects in accordance with the present disclosure.

[1125] COLO320DM human colorectal cancer cells (ATCC, CCL-220), which comprise various mutations, e.g., APC and TP53, etc., were expanded in RPMI 1640 media (10% FBS) and inoculated subcutaneously, 10⁷ cells per animal in 100 uL PBS/Matrigel (1:1) mixture, to male NU/J mice (JAX #2019) at 8 weeks of age. When the average tumor size reached 150 mm³, mice were randomized into 3 cohorts (n=10) and treated with vehicle (1% Tween 80/99% 10 mM PBS pH 7.4), I-66 (30 mg/kg), and I-66 (75 mg/kg) via intraperitoneal injection, once every 4 days for 5 doses.

[1126] Tumor volume was measured by electronic caliper every 2-3 days until tumor volume reached 2000 mm³ and estimated as (length×width²)/2. Body weights were weighed every 2-3 days and represented as % body weight=(BWi−BW0)/BW0×100% (BWi: body weight at day i, BW0: body weight at day 0). Tumor growth inhibition was calculated as, TG1%=[1−(TVi−TV0)/(TVvi−TVv0)]×100% (TVi: average tumor volume of a dosing group on day i, TVO: average tumor volume of a dosing group on day 0, TVvi: average tumor volume of a vehicle group on day i, TVv0: average tumor volume of a vehicle group on day0). Animals were euthanized by CO₂ asphyxiation on the designated terminal day for each study, and plasma, tumors, tissues, etc., were excised for further analysis. Certain data are presented in FIG. 4 as examples.

[1127] As confirmed, technologies of the present disclosure can provide robust anti-tumor efficacy. For example, in some embodiments, in COLO320DM xenograft model, I-66 was dosed once every four days, and the treatment led to significant tumor growth inhibitions (TGI) of 66% and 89% at 30 and 75 mg/kg on day 14, respectively. At 75 mg/kg, an initial loss in body weight was observed after the first dose but recovered over time.

[1128] In some embodiments, transcriptional effects of pathway inhibition in vivo were assessed. For example, in some embodiments, several PD markers from COLO320DM tumors obtained at the end of the efficacy study (e.g., Day 18) were assessed. In agreement with in vitro and single-dose in vivo data, both AXIN2 and CXCL12 were dose-dependently regulated by provided technologies, e.g., I-66, in tumors (for AXIN2, down-regulation and for CXCL12, up-regulation), confirming durable target gene modulation. Reduction of mouse NOTUM level in plasma was also observed. In some embodiments, NOTUM may be utilized as a biomarker, e.g., for assessing a treatment, selecting patient population, determining whether to continue treatment, etc. In some embodiments, assessment of human plasma samples from normal and patients, e.g., colorectal cancer patients, confirms that NOTUM levels are correlated with stage of diseases and may be suitable for clinical applications, e.g., as a target engagement biomarker.

[1129] Among other things, various suitable in vivo pharmacokinetic and/or pharmacodynamic properties and/or activities have been confirmed. For example, as confirmed in FIG. 5, (A), provided technologies can be effectively delivered to tumors. As shown, prolonged tumor exposure to I-66 was observed after a single dose, and tumor exposure was about 2~10 fold above in vitro IC50 for proliferation. It was also observed that I-66 tumor PK exceeded plasma PK at 96 hr time point. Further, I-66 provided significantly longer time periods during which tumor exposure was about or above in vitro IC50 for proliferation when compared to, e.g., Peptide A (Ac-PL3-Asp-Npg-B5-Asp-3COOHF-Ala-Ala-Phe-Leu-PyrS2-2F3MeF-BztA-Gln-NH₂; PL3 and B5, and B5 and PyrS2 are stapled). A useful protocol for assessment is described below as an example.

[1130] Experiments were carried out under an Institutional Animal Care and Use Committee-approved protocol, and institutional guidelines for the proper and humane use of animals were followed.

[1131] For COLO320DM, male NU/J mice (6-8 weeks of age) were utilized, and mice were randomized when average tumor volume reached 300 mm³. For IP dosing, agents were formulated in 10 mg/mL arginine and 6% PEG400 phosphate (pH 7.4) formulation.

[1132] Concentrations of agents in biological samples were measured by LC-MS/MS (Triple Quad 6500+). Using analytical grade chemicals and solvents, 25 ng/ml Tolbutamide in acetonitrile (ACN, LS120-4, Fisher Scientific) was used as internal standards. 8 uL of plasma or tissue lysate was used for LC method with mobile phase A (1% formic acid (FA, LS118-4, Fisher Scientific) in H₂O) and mobile phase B (0.1% FA in ACN), 0.6 ml/min flow rate in Waters ACQUITY UPLC BEH C18 2.1*50 mm, 1.7 μm column. The calibration curve was generated using 5-5000 ng/ml agent, e.g., I-66, in mouse plasma and tissue homogenates. MS was conducted by electrospray ionization and multi reaction monitor scans. PK parameters such as plasma maximum concentration (Cmax), and AUC were analyzed by noncompartmental model 200 of Phoenix WinNonlin 8.3, using the linear/log trapezoidal method.

[1133] Additional data confirm well-behaved pharmacokinetic (PK) profiles of provided technologies. See, for example, FIG. 5, (B) and data below.

[1134] Certain PK parameters of I-66 in mouse by 2-compartmental analysis.

| PK Parameters | IV | IP |
|---|---|---|
| Cmax(ng/mL) | 498654 | 152000 |
| T_{1/2} (h) | 28.71 | 41.7 |
| Tₘₐₓ (h) | NA | 6.67 |
| Vdₛₛ (L/kg) | 0.452 | NA |
| Cl (mL/min/kg) | 0.30 | NA |
| Tₗₐₛₜ (h) | 168.00 | 168.00 |
| AUC₀₋ₗₐₛₜ (ng · h/mL) | 2741991 | 2971069 |
| AUC_{0-inf} (ng · h/mL) | 2826191 | 3124730 |
| Bioavailability (%) | NA | 105.0 |

[1135] In some embodiments, broad tissue distribution was observed. For example, as shown in FIG. 5, (C), I-66 was detected in all samples shown. In some embodiments, durable tissue residence was confirmed at least between 24- and 96-hr post-injection. In some embodiments, a single intraperitoneal (IP) dose of I-66 and I-470 at 100 mg/kg demonstrated comparable plasma AUC in mouse.

[1136] Robust and durable anti-tumor effects by provided technologies were confirmed in additional tumor models. In some embodiments, such effects were observed in a Patient-Derived Xenograft (PDX) cancer models.

[1137] In some embodiments, provided technologies were assessed in hepatocellular cancer models. As shown in FIG. 19, provided technologies can effectively reduce tumor sizes. In some embodiments, tumors comprise beta-catenin mutations as described herein, e.g., beta-catenin D32H, D32V, etc. As confirmed in FIG. 20, in some embodiments, provided technologies can provide tumor volume reductions and/or reduce or prevent tumor growth across multiple doses and/or post doses (e.g., after about 10, 15, 20, 25, 30 or more days after a last dose). As confirmed in FIG. 21, provided technologies can be utilized against tumors comprising various beta-catenin mutations (e.g., S45F or S37C in FIG. 21, (A) and (B), respectively), in some embodiments with other mutations (e.g., MSH6 mutation in FIG. 21, (A)). In some embodiments, a tumor carries high mutation burden, e.g., as in FIG. 21, (A). In some embodiments, a tumor, e.g., as in FIG. 21, (A), carriers MSH6 mutation. In some embodiments, a tumor is MSI-H. Certain useful procedures are described herein as examples. In some embodiments, assessments were carried out under an Institutional Animal Care and Use Committee-approved protocol, and institutional guidelines for proper and humane use of animals were followed. I-66 were formulated in 10 mM sodium phosphate dibasic, 10 mg/mL arginine and 6% PEG400 phosphate (pH 7.4) formulation for IP dosing. Female BALB/c nude mice (6-8 weeks) were used. Mice were implanted subcutaneously at the right flank with frozen passage 5 (FP5) PDX tumor slices (~30 mm³ with Matrigel) for tumor development. The animals were randomized when tumors had grown to an approximate caliper-measured volume of about 108, 150 or 170 mm³. Mice were randomized into 2 dosing groups of 5 mice per group for vehicle and I-66 (60 mg/kg). Mice in each dosing group are injected once every 4 days (Q4D) or every 7 days (Q7D) via IP. Tumor volume was measured every 2-3 days using an electronic caliper until tumor volume reached 2000 mm³ as estimated by (length×width²)/2. Body weights were measured every 2-3 days.

[1138] Among other things, data in various Examples confirmed that provided technologies can provide robust PK properties, strong anti-tumor efficacy and on-target transcriptional modulation in vivo.

[1139] Among other things, provided technologies can modulate expression of various nucleic acids and/or levels of products thereof, e.g., RNA transcripts, polypeptides, etc. For example, tumor RNA-sequencing analysis confirmed that I-66 can provide, among other things, strong on-target Wnt/beta-catenin pathway modulation in COLO320DM tumors. Certain negatively enriched gene sets are presented below as examples. In some embodiments, a negatively enriched gene is CCND2, WNT5B, AXIN2, NKD1, WNT6, DKK1, or DKK4. In some embodiments, top Negatively Enriched Gene Sets include BCAT_GDS748_UP, BCAT.100_UP.V1_UP, HALLMARK_WNT_BETA-CATENIN_SIGNALING, RASHI-RESPONSE_TO_IONIZING-RADIATION_1, REACTOME-RRNA_PROCESSING, HALLMARK_MYC_TARGETS_V1, HALLMARK_MYC_TARGETS_V2, HALLMARK_OXIDATIVE_PHOSPHORYLATION, HALLMARK_E2F_TARGETS, HALLMARK_TNFA_SIGNALING_VIA_NFKB. I-66 vs. I-470. i.p. 30 mg/kg, 48 hr post single dose. NES-1.7 or smaller. FDR q-value 0.02 or smaller.

[1140] In some embodiments, structures, interactions, etc. are characterized and assessed using X-Ray crystallography and structure determination. In some embodiments, atomic coordinates and structure factors are deposited in the Protein Data Bank (e.g., for beta-catenin/I-66, 8EK2, etc.). Among other things, the structure confirmed that various amino acid residues in I-66 interact with various amino acid residues in beta-catenin, for example: PL3-1 with Val349, Asp2 with Lys312 and Gly307, Npg3 with Tyr306, Asp5 with Asn387 and Trp383, 3COOHF6 with Arg342 and Lys345, Ala8 with Trp383, Phe9 with Lys345 and Trp383, 3Thi12 with Trp383 and Asn415, and BztA13 with Gln379, Leu382, Val416, Asn415, and Trp383. Other residues, e.g., Q302, A305, V346, R386, N380, C419, etc., are also within vicinity of I-66 and may contribute to I-66 binding to beta-catenin.

[1141] In some embodiments, animal models are utilized to as provided technologies. Experiments were typically carried out under an Institutional Animal Care and Use Committee-approved protocol, and institutional guidelines for the proper and humane use of animals were followed.

[1142] Various useful technologies for assessing agents of the present disclosure and results therefrom are described in the Examples of WO 2022/261257 and are incorporated herein by reference.

[1143] While various embodiments have been described and illustrated herein, those of ordinary skill in the art will readily envision a variety of other means and/or structures for performing the functions and/or obtaining the results and/or one or more of the advantages described in the present disclosure, and each of such variations and/or modifications is deemed to be included. More generally, those skilled in the art will readily appreciate that all parameters, dimensions, materials, and configurations described herein are meant to be example and that the actual parameters, dimensions, materials, and/or configurations will depend upon the specific application or applications for which the teachings of the present disclosure is/are used. Those skilled in the art will recognize, or be able to ascertain using no more than routine experimentation, many equivalents to the specific embodiments of the disclosure described in the present disclosure. It is, therefore, to be understood that the foregoing embodiments are presented by way of example only and that, provided technologies, including those to be claimed, may be practiced otherwise than as specifically described and claimed. In addition, any combination of two or more features, systems, articles, materials, kits, and/or methods, if such features, systems, articles, materials, kits, and/or methods are not mutually inconsistent, is included within the scope of the present disclosure.

The application's sequence listing, which the Patent Office published only in electronic form, follows.

SEQUENCE LISTING (1627 sequences)

SEQ ID NO: 1 - protein, 781 aa, Homo sapiens
MATQADLMELDMAMEPDRKAAVSHWQQQSYLDSGIHSGATTTAPSLSGKGNPEEEDVDTSQVLYEWEQGFSQSFTQEQVADIDGQYAMTRAQRVRAAMFPETLDEGMQIPSTQFDAAHPTNVQRLAEPSQMLKHAVVNLINYQDDAELATRAIPELTKLLNDEDQVVVNKAAVMVHQLSKKEASRHAIMRSPQMVSAIVRTMQNTNDVETARCTAGTLHNLSHHREGLLAIFKSGGIPALVKMLGSPVDSVLFYAITTLHNLLLHQEGAKMAVRLAGGLQKMVALLNKTNVKFLAITTDCLQILAYGNQESKLIILASGGPQALVNIMRTYTYEKLLWTTSRVLKVLSVCSSNKPAIVEAGGMQALGLHLTDPSQRLVQNCLWTLRNLSDAATKQEGMEGLLGTLVQLLGSDDINVVTCAAGILSNLTCNNYKNKMMVCQVGGIEALVRTVLRAGDREDITEPAICALRHLTSRHQEAEMAQNAVRLHYGLPVVVKLLHPPSHWPLIKATVGLIRNLALCPANHAPLREQGAIPRLVQLLVRAHQDTQRRTSMGGTQQQFVEGVRMEEIVEGCTGALHILARDVHNRIVIRGLNTIPLFVQLLYSPIENIQRVAAGVLCELAQDKEAAEAIEAEGATAPLTELLHSRNEGVATYAAAVLFRMSEDKPQDYKKRLSVELTSSLFRTEPMAWNETADLGLDIGAQGEPLGYRQDDPSYRSFHSGGYGQDALGMDPMMEHEMGGHHPGADYPVDGLPDLGHAQDLMDGLPPGDSNQLAWFDTDL

SEQ ID NO: 2 - protein, 201 aa, Homo sapiens
SVLFYAITTLHNLLLHQEGAKMAVRLAGGLQKMVALLNKTNVKFLAITTDCLQILAYGNQESKLIILASGGPQALVNIMRTYTYEKLLWTTSRVLKVLSVCSSNKPAIVEAGGMQALGLHLTDPSQRLVQNCLWTLRNLSDAATKQEGMEGLLGTLVQLLGSDDINVVTCAAGILSNLTCNNYKNKMMVCQVGGIEALVRT

SEQ ID NO: 3 - protein, 17 aa, Homo sapiens
LQILAYGNQESKLIILA

SEQ ID NO: 4 - protein, 13 aa, Homo sapiens
SRVLKVLSVCSSN

SEQ ID NO: 5 - protein, 16 aa, Homo sapiens
RLVQNCLWTLRNLSDA

SEQ ID NO: 6 - protein, 15 aa, Homo sapiens
LGSDDINVVTCAAGI

SEQ ID NO: 7 - protein, 15 aa, synthetic construct
  SITE 1: note = N-term Acetic Acid
  SITE 1: note = (R)-2-allylpyrrolidine-2-carboxylic acid, stapled with another amino acid residue comprising an olefin group to form a staple through the olefin group, Z olefin in the staple
  SITE 3: note = (S)-2-amino-4,4-dimethylpentanoic acid
  VARIANT 4: note = 2-amino-2-(pent-4-en-1-yl)hept-6-enoic acid, stapled with another amino acid residue comprising an olefin group to form a staple through one of the two olefin groups and with another amino acid residue comprising an olefin group to form a staple through the other of the two olefin groups, R configuration
  SITE 6: note = (S)-3-(2-amino-2-carboxyethyl)benzoic acid
  SITE 7: note = 2-amino-2-methylpropanoic acid
  SITE 10: note = Cysteine, sulfur bonded to the methyl at position 1 of 1,3-dimethylbenzene, stapled with another thiol through the methyl at position 3 of 1,3-dimethylbenzene
  SITE 11: note (S)-3-amino-1-((pent-4-en-1-yloxy)carbonyl)pyrrolidine-3-ca rboxylic acid, stapled with another amino acid residue comprising an olefin group to form a staple through the olefin group, Z olefin in the staple
  SITE 12: note = (S)-2-amino-3-(2-(trifluoromethyl)phenyl)propanoic acid
  SITE 13: note = (S)-2-amino-3-(benzo[b]thiophen-3-yl)propanoic acid
  SITE 15: note = C-term amino
XDXXDXXAFCXXXCA

SEQ ID NO: 8 - protein, 15 aa, synthetic construct
  SITE 1: note = N-term Acetic Acid
  SITE 1: note = (R)-2-allylpyrrolidine-2-carboxylic acid, stapled with another amino acid residue comprising an olefin group to form a staple through the olefin group, E olefin in the staple
  SITE 3: note = (S)-2-amino-4,4-dimethylpentanoic acid
  VARIANT 4: note = 2-amino-2-(pent-4-en-1-yl)hept-6-enoic acid, stapled with another amino acid residue comprising an olefin group to form a staple through one of the two olefin groups and with another amino acid residue comprising an olefin group to form a staple through the other of the two olefin groups, S configuration
  SITE 6: note = (S)-3-(2-amino-2-carboxyethyl)benzoic acid
  SITE 7: note = 2-amino-2-methylpropanoic acid
  SITE 10: note = Cysteine, sulfur bonded to the methyl at position 1 of 1,3-dimethylbenzene, stapled with another thiol through the methyl at position 3 of 1,3-dimethylbenzene
  SITE 11: note (S)-3-amino-1-((pent-4-en-1-yloxy)carbonyl)pyrrolidine-3-ca rboxylic acid, stapled with another amino acid residue comprising an olefin group to form a staple through the olefin group, Z olefin in the staple
  SITE 12: note = (S)-2-amino-3-(2-(trifluoromethyl)phenyl)propanoic acid
  SITE 13: note = (S)-2-amino-3-(benzo[b]thiophen-3-yl)propanoic acid
  SITE 15: note = C-term amino
XDXXDXXAFCXXXCA

SEQ ID NO: 9 - protein, 15 aa, synthetic construct
  SITE 1: note = N-term Acetic Acid
  SITE 1: note = (R)-2-allylpyrrolidine-2-carboxylic acid, stapled with another amino acid residue comprising an olefin group to form a staple through the olefin group, E olefin in the staple
  SITE 3: note = (S)-2-amino-4,4-dimethylpentanoic acid
  VARIANT 4: note = 2-amino-2-(pent-4-en-1-yl)hept-6-enoic acid, stapled with another amino acid residue comprising an olefin group to form a staple through one of the two olefin groups and with another amino acid residue comprising an olefin group to form a staple through the other of the two olefin groups, R configuration
  SITE 6: note = (S)-3-(2-amino-2-carboxyethyl)benzoic acid
  SITE 7: note = 2-amino-2-methylpropanoic acid
  SITE 10: note = Cysteine, sulfur bonded to the methyl at position 1 of 1,3-dimethylbenzene, stapled with another thiol through the methyl at position 3 of 1,3-dimethylbenzene
  SITE 11: note (S)-3-amino-1-((pent-4-en-1-yloxy)carbonyl)pyrrolidine-3-ca rboxylic acid, stapled with another amino acid residue comprising an olefin group to form a staple through the olefin group, Z olefin in the staple
  SITE 12: note = (S)-2-amino-3-(2-(trifluoromethyl)phenyl)propanoic acid
  SITE 13: note = (S)-2-amino-3-(benzo[b]thiophen-3-yl)propanoic acid
  SITE 15: note = C-term amino
XDXXDXXAFCXXXCA

SEQ ID NO: 10 - protein, 15 aa, synthetic construct
  SITE 1: note = N-term Acetic Acid
  SITE 1: note = (R)-2-allylpyrrolidine-2-carboxylic acid, stapled with another amino acid residue comprising an olefin group to form a staple through the olefin group, E olefin in the staple
  SITE 3: note = (S)-2-amino-4,4-dimethylpentanoic acid
  VARIANT 4: note = 2-amino-2-(pent-4-en-1-yl)hept-6-enoic acid, stapled with another amino acid residue comprising an olefin group to form a staple through one of the two olefin groups and with another amino acid residue comprising an olefin group to form a staple through the other of the two olefin groups, R configuration
  SITE 6: note = (S)-3-(2-amino-2-carboxyethyl)benzoic acid
  SITE 7: note = 1-aminocyclopentane-1-carboxylic acid
  SITE 10: note = L-lysine, stapled with another amino acid residue comprising a side chain acid group to form a staple through the 6-amino group
  SITE 11: note (S)-3-amino-1-((pent-4-en-1-yloxy)carbonyl)pyrrolidine-3-ca rboxylic acid, stapled with another amino acid residue comprising an olefin group to form a staple through the olefin group, E olefin in the staple
  SITE 12: note = (S)-2-amino-3-(thiophen-3-yl)propanoic acid
  SITE 13: note = (S)-2-amino-3-(benzo[b]thiophen-3-yl)propanoic acid
  SITE 14: note = L-glutamic acid, stapled with another amino acid residue comprising a side chain amino group to form a staple through the 4-carboxyl group
  SITE 15: note = C-term amino
XDXXDXXAFKXXXEA

SEQ ID NO: 11 - protein, 14 aa, synthetic construct
  SITE 1: note = N-term Acetic Acid
  SITE 1: note = (R)-2-allylpyrrolidine-2-carboxylic acid, useful for stapling/stapled with another amino acid residue comprising an olefin group to form a staple through the olefin group
  VARIANT 4: note = 2-amino-2-(pent-4-en-1-yl)hept-6-enoic acid, useful for stapling/stapled with another amino acid residue comprising an olefin group to form a staple through one of the two olefin groups and/or with another amino acid residue comprising an olefin group to form a staple through the other of the two olefin groups
  SITE 10: note = D-lysine, useful for stapling/stapled with another amino acid residue comprising a side chain acid group to form a staple through the 6-amino group
  SITE 11: note (S)-3-amino-1-((pent-4-en-1-yloxy)carbonyl)pyrrolidine-3-ca rboxylic acid, useful for stapling/stapled with another amino acid residue comprising an olefin group to form a staple through the olefin group
  SITE 12: note = (S)-2-amino-3-(thiophen-3-yl)propanoic acid
  SITE 13: note = (S)-2-amino-3-(benzo[b]thiophen-3-yl)propanoic acid
  SITE 14: note = L-glutamic acid, useful for stapling/stapled with another amino acid residue comprising a side chain amino group to form a staple through the 4-carboxyl group
  SITE 14: note = C-term amino
XDLXDDAAFKXXXE

SEQ ID NO: 12 - protein, 14 aa, synthetic construct
  SITE 1: note = N-term Acetic Acid
  SITE 1: note = (R)-2-allylpyrrolidine-2-carboxylic acid, useful for stapling/stapled with another amino acid residue comprising an olefin group to form a staple through the olefin group
  VARIANT 4: note = 2-amino-2-(pent-4-en-1-yl)hept-6-enoic acid, useful for stapling/stapled with another amino acid residue comprising an olefin group to form a staple through one of the two olefin groups and/or with another amino acid residue comprising an olefin group to form a staple through the other of the two olefin groups
  SITE 10: note = L-lysine, useful for stapling/stapled with another amino acid residue comprising a side chain acid group to form a staple through the 6-amino group
  SITE 11: note (S)-3-amino-1-((pent-4-en-1-yloxy)carbonyl)pyrrolidine-3-ca rboxylic acid, useful for stapling/stapled with another amino acid residue comprising an olefin group to form a staple through the olefin group
  SITE 12: note = (S)-2-amino-3-(thiophen-3-yl)propanoic acid
  SITE 13: note = (S)-2-amino-3-(benzo[b]thiophen-3-yl)propanoic acid
  SITE 14: note = L-glutamic acid, useful for stapling/stapled with another amino acid residue comprising a side chain amino group to form a staple through the 4-carboxyl group
  SITE 14: note = C-term amino
XDLXDDAAFKXXXE

SEQ ID NO: 13 - protein, 14 aa, synthetic construct
  SITE 1: note = N-term Acetic Acid
  SITE 1: note = (R)-2-allylpyrrolidine-2-carboxylic acid, useful for stapling/stapled with another amino acid residue comprising an olefin group to form a staple through the olefin group
  VARIANT 4: note = 2-amino-2-(pent-4-en-1-yl)hept-6-enoic acid, useful for stapling/stapled with another amino acid residue comprising an olefin group to form a staple through one of the two olefin groups and/or with another amino acid residue comprising an olefin group to form a staple through the other of the two olefin groups
  SITE 10: note = D-glutamic acid, useful for stapling/stapled with another amino acid residue comprising a side chain amino group to form a staple through the 4-carboxyl group
  SITE 11: note (S)-3-amino-1-((pent-4-en-1-yloxy)carbonyl)pyrrolidine-3-ca rboxylic acid, useful for stapling/stapled with another amino acid residue comprising an olefin group to form a staple through the olefin group
  SITE 12: note = (S)-2-amino-3-(thiophen-3-yl)propanoic acid
  SITE 13: note = (S)-2-amino-3-(benzo[b]thiophen-3-yl)propanoic acid
  SITE 14: note = L-lysine, useful for stapling/stapled with another amino acid residue comprising a side chain acid group to form a staple through the 6-amino group
  SITE 14: note = C-term amino
XDLXDDAAFEXXXK

SEQ ID NO: 14 - protein, 14 aa, synthetic construct
  SITE 1: note = N-term Acetic Acid
  SITE 1: note = (R)-2-allylpyrrolidine-2-carboxylic acid, useful for stapling/stapled with another amino acid residue comprising an olefin group to form a staple through the olefin group
  VARIANT 4: note = 2-amino-2-(pent-4-en-1-yl)hept-6-enoic acid, useful for stapling/stapled with another amino acid residue comprising an olefin group to form a staple through one of the two olefin groups and/or with another amino acid residue comprising an olefin group to form a staple through the other of the two olefin groups
  SITE 10: note = L-glutamic acid, useful for stapling/stapled with another amino acid residue comprising a side chain amino group to form a staple through the 4-carboxyl group
  SITE 11: note (S)-3-amino-1-((pent-4-en-1-yloxy)carbonyl)pyrrolidine-3-ca rboxylic acid, useful for stapling/stapled with another amino acid residue comprising an olefin group to form a staple through the olefin group
  SITE 12: note = (S)-2-amino-3-(thiophen-3-yl)propanoic acid
  SITE 13: note = (S)-2-amino-3-(benzo[b]thiophen-3-yl)propanoic acid
  SITE 14: note = L-lysine, useful for stapling/stapled with another amino acid residue comprising a side chain acid group to form a staple through the 6-amino group
  SITE 14: note = C-term amino
XDLXDDAAFEXXXK

SEQ ID NO: 15 - protein, 14 aa, synthetic construct
  SITE 1: note = N-term Acetic Acid
  SITE 1: note = (R)-2-allylpyrrolidine-2-carboxylic acid, useful for stapling/stapled with another amino acid residue comprising an olefin group to form a staple through the olefin group
  VARIANT 4: note = 2-amino-2-(pent-4-en-1-yl)hept-6-enoic acid, useful for stapling/stapled with another amino acid residue comprising an olefin group to form a staple through one of the two olefin groups and/or with another amino acid residue comprising an olefin group to form a staple through the other of the two olefin groups
  SITE 7: note = L-lysine, useful for stapling/stapled with another amino acid residue comprising a side chain acid group to form a staple through the 6-amino group
  SITE 10: note = L-glutamic acid, useful for stapling/stapled with another amino acid residue comprising a side chain amino group to form a staple through the 4-carboxyl group
  SITE 11: note (S)-3-amino-1-((pent-4-en-1-yloxy)carbonyl)pyrrolidine-3-ca rboxylic acid, useful for stapling/stapled with another amino acid residue comprising an olefin group to form a staple through the olefin group
  SITE 12: note = (S)-2-amino-3-(thiophen-3-yl)propanoic acid
  SITE 13: note = (S)-2-amino-3-(benzo[b]thiophen-3-yl)propanoic acid
  SITE 14: note = C-term amino
XDLXDDKAFEXXXQ

SEQ ID NO: 16 - protein, 14 aa, synthetic construct
  SITE 1: note = N-term Acetic Acid
  SITE 1: note = (R)-2-allylpyrrolidine-2-carboxylic acid, useful for stapling/stapled with another amino acid residue comprising an olefin group to form a staple through the olefin group
  VARIANT 4: note = 2-amino-2-(pent-4-en-1-yl)hept-6-enoic acid, useful for stapling/stapled with another amino acid residue comprising an olefin group to form a staple through one of the two olefin groups and/or with another amino acid residue comprising an olefin group to form a staple through the other of the two olefin groups
  SITE 7: note = L-glutamic acid, useful for stapling/stapled with another amino acid residue comprising a side chain amino group to form a staple through the 4-carboxyl group
  SITE 10: note = L-lysine, useful for stapling/stapled with another amino acid residue comprising a side chain acid group to form a staple through the 6-amino group
  SITE 11: note (S)-3-amino-1-((pent-4-en-1-yloxy)carbonyl)pyrrolidine-3-ca rboxylic acid, useful for stapling/stapled with another amino acid residue comprising an olefin group to form a staple through the olefin group
  SITE 12: note = (S)-2-amino-3-(thiophen-3-yl)propanoic acid
  SITE 13: note = (S)-2-amino-3-(benzo[b]thiophen-3-yl)propanoic acid
  SITE 14: note = C-term amino
XDLXDDEAFKXXXQ

SEQ ID NO: 17 - protein, 14 aa, synthetic construct
  SITE 1: note = N-term Acetic Acid
  SITE 1: note = (R)-2-allylpyrrolidine-2-carboxylic acid, useful for stapling/stapled with another amino acid residue comprising an olefin group to form a staple through the olefin group
  VARIANT 4: note = 2-amino-2-(pent-4-en-1-yl)hept-6-enoic acid, useful for stapling/stapled with another amino acid residue comprising an olefin group to form a staple through one of the two olefin groups and/or with another amino acid residue comprising an olefin group to form a staple through the other of the two olefin groups
  SITE 6: note = (S)-3-(2-amino-2-carboxyethyl)benzoic acid
  SITE 10: note = D-lysine, useful for stapling/stapled with another amino acid residue comprising a side chain acid group to form a staple through the 6-amino group
  SITE 11: note (S)-3-amino-1-((pent-4-en-1-yloxy)carbonyl)pyrrolidine-3-ca rboxylic acid, useful for stapling/stapled with another amino acid residue comprising an olefin group to form a staple through the olefin group
  SITE 12: note = (S)-2-amino-3-(thiophen-3-yl)propanoic acid
  SITE 13: note = (S)-2-amino-3-(benzo[b]thiophen-3-yl)propanoic acid
  SITE 14: note = L-glutamic acid, useful for stapling/stapled with another amino acid residue comprising a side chain amino group to form a staple through the 4-carboxyl group
  SITE 14: note = C-term amino
XDLXDXAAFKXXXE

SEQ ID NO: 18 - protein, 14 aa, synthetic construct
  SITE 1: note = N-term Acetic Acid
  SITE 1: note = (R)-2-allylpyrrolidine-2-carboxylic acid, useful for stapling/stapled with another amino acid residue comprising an olefin group to form a staple through the olefin group
  VARIANT 4: note = 2-amino-2-(pent-4-en-1-yl)hept-6-enoic acid, useful for stapling/stapled with another amino acid residue comprising an olefin group to form a staple through one of the two olefin groups and/or with another amino acid residue comprising an olefin group to form a staple through the other of the two olefin groups
  SITE 6: note = (S)-3-(2-amino-2-carboxyethyl)benzoic acid
  SITE 10: note = L-lysine, useful for stapling/stapled with another amino acid residue comprising a side chain acid group to form a staple through the 6-amino group
  SITE 11: note (S)-3-amino-1-((pent-4-en-1-yloxy)carbonyl)pyrrolidine-3-ca rboxylic acid, useful for stapling/stapled with another amino acid residue comprising an olefin group to form a staple through the olefin group
  SITE 12: note = (S)-2-amino-3-(thiophen-3-yl)propanoic acid
  SITE 13: note = (S)-2-amino-3-(benzo[b]thiophen-3-yl)propanoic acid
  SITE 14: note = L-glutamic acid, useful for stapling/stapled with another amino acid residue comprising a side chain amino group to form a staple through the 4-carboxyl group
  SITE 14: note = C-term amino
XDLXDXAAFKXXXE

SEQ ID NO: 19 - protein, 14 aa, synthetic construct
  SITE 1: note = N-term Acetic Acid
  SITE 1: note = (R)-2-allylpyrrolidine-2-carboxylic acid, useful for stapling/stapled with another amino acid residue comprising an olefin group to form a staple through the olefin group
  VARIANT 4: note = 2-amino-2-(pent-4-en-1-yl)hept-6-enoic acid, useful for stapling/stapled with another amino acid residue comprising an olefin group to form a staple through one of the two olefin groups and/or with another amino acid residue comprising an olefin group to form a staple through the other of the two olefin groups
  SITE 6: note = (S)-3-(2-amino-2-carboxyethyl)benzoic acid
  SITE 10: note = D-glutamic acid, useful for stapling/stapled with another amino acid residue comprising a side chain amino group to form a staple through the 4-carboxyl group
  SITE 11: note (S)-3-amino-1-((pent-4-en-1-yloxy)carbonyl)pyrrolidine-3-ca rboxylic acid, useful for stapling/stapled with another amino acid residue comprising an olefin group to form a staple through the olefin group
  SITE 12: note = (S)-2-amino-3-(thiophen-3-yl)propanoic acid
  SITE 13: note = (S)-2-amino-3-(benzo[b]thiophen-3-yl)propanoic acid
  SITE 14: note = L-lysine, useful for stapling/stapled with another amino acid residue comprising a side chain acid group to form a staple through the 6-amino group
  SITE 14: note = C-term amino
XDLXDXAAFEXXXK

SEQ ID NO: 20 - protein, 14 aa, synthetic construct
  SITE 1: note = N-term Acetic Acid
  SITE 1: note = (R)-2-allylpyrrolidine-2-carboxylic acid, useful for stapling/stapled with another amino acid residue comprising an olefin group to form a staple through the olefin group
  VARIANT 4: note = 2-amino-2-(pent-4-en-1-yl)hept-6-enoic acid, useful for stapling/stapled with another amino acid residue comprising an olefin group to form a staple through one of the two olefin groups and/or with another amino acid residue comprising an olefin group to form a staple through the other of the two olefin groups
  SITE 6: note = (S)-3-(2-amino-2-carboxyethyl)benzoic acid
  SITE 10: note = L-glutamic acid, useful for stapling/stapled with another amino acid residue comprising a side chain amino group to form a staple through the 4-carboxyl group
  SITE 11: note (S)-3-amino-1-((pent-4-en-1-yloxy)carbonyl)pyrrolidine-3-ca rboxylic acid, useful for stapling/stapled with another amino acid residue comprising an olefin group to form a staple through the olefin group
  SITE 12: note = (S)-2-amino-3-(thiophen-3-yl)propanoic acid
  SITE 13: note = (S)-2-amino-3-(benzo[b]thiophen-3-yl)propanoic acid
  SITE 14: note = L-lysine, useful for stapling/stapled with another amino acid residue comprising a side chain acid group to form a staple through the 6-amino group
  SITE 14: note = C-term amino
XDLXDXAAFEXXXK

SEQ ID NO: 21 - protein, 14 aa, synthetic construct
  SITE 1: note = N-term Acetic Acid
  SITE 1: note = (R)-2-allylpyrrolidine-2-carboxylic acid, useful for stapling/stapled with another amino acid residue comprising an olefin group to form a staple through the olefin group
  SITE 3: note = (S)-2-amino-4,4-dimethylpentanoic acid
  VARIANT 4: note = 2-amino-2-(pent-4-en-1-yl)hept-6-enoic acid, useful for stapling/stapled with another amino acid residue comprising an olefin group to form a staple through one of the two olefin groups and/or with another amino acid residue comprising an olefin group to form a staple through the other of the two olefin groups
  SITE 10: note = (S)-2-amino-6-(1H-1,2,3-triazol-1-yl)hexanoic acid, useful for stapling/stapled with another amino acid residue to form a staple through the 4-position of the triazolyl group
  SITE 11: note (S)-3-amino-1-((pent-4-en-1-yloxy)carbonyl)pyrrolidine-3-ca rboxylic acid, useful for stapling/stapled with another amino acid residue comprising an olefin group to form a staple through the olefin group
  SITE 12: note = (S)-2-amino-3-(thiophen-3-yl)propanoic acid
  SITE 13: note = (S)-2-amino-3-(benzo[b]thiophen-3-yl)propanoic acid
  SITE 14: note = L-alanine, useful for stapling/stapled with another amino acid residue comprising a triazolyl group to form a staple through the terminal methyl group
  SITE 14: note = C-term amino
XDXXDDAAFXXXXA

SEQ ID NO: 22 - protein, 14 aa, synthetic construct
  SITE 1: note = N-term Acetic Acid
  SITE 1: note = (R)-2-allylpyrrolidine-2-carboxylic acid, useful for stapling/stapled with another amino acid residue comprising an olefin group to form a staple through the olefin group
  SITE 3: note = (S)-2-amino-4,4-dimethylpentanoic acid
  VARIANT 4: note = 2-amino-2-(pent-4-en-1-yl)hept-6-enoic acid, useful for stapling/stapled with another amino acid residue comprising an olefin group to form a staple through one of the two olefin groups and/or with another amino acid residue comprising an olefin group to form a staple through the other of the two olefin groups
  SITE 6: note = (S)-3-(2-amino-2-carboxyethyl)benzoic acid
  SITE 10: note = (S)-2-amino-6-(1H-1,2,3-triazol-1-yl)hexanoic acid, useful for stapling/stapled with another amino acid residue to form a staple through the 4-position of the triazolyl group
  SITE 11: note (S)-3-amino-1-((pent-4-en-1-yloxy)carbonyl)pyrrolidine-3-ca rboxylic acid, useful for stapling/stapled with another amino acid residue comprising an olefin group to form a staple through the olefin group
  SITE 12: note = (S)-2-amino-3-(thiophen-3-yl)propanoic acid
  SITE 13: note = (S)-2-amino-3-(benzo[b]thiophen-3-yl)propanoic acid
  SITE 14: note = L-alanine, useful for stapling/stapled with another amino acid residue comprising a triazolyl group to form a staple through the terminal methyl group
  SITE 14: note = C-term amino
XDXXDXAAFXXXXA

SEQ ID NO: 23 - protein, 14 aa, synthetic construct
  SITE 1: note = N-term Acetic Acid
  SITE 1: note = (R)-2-allylpyrrolidine-2-carboxylic acid, useful for stapling/stapled with another amino acid residue comprising an olefin group to form a staple through the olefin group
  SITE 3: note = (S)-2-amino-4,4-dimethylpentanoic acid
  VARIANT 4: note = 2-amino-2-(pent-4-en-1-yl)hept-6-enoic acid, useful for stapling/stapled with another amino acid residue comprising an olefin group to form a staple through one of the two olefin groups and/or with another amino acid residue comprising an olefin group to form a staple through the other of the two olefin groups
  SITE 6: note = (S)-3-(2-amino-2-carboxyethyl)benzoic acid
  SITE 10: note = (S)-2-amino-6-(1H-1,2,3-triazol-1-yl)hexanoic acid, useful for stapling/stapled with another amino acid residue to form a staple through the 4-position of the triazolyl group
  SITE 11: note (S)-3-amino-1-((pent-4-en-1-yloxy)carbonyl)pyrrolidine-3-ca rboxylic acid, useful for stapling/stapled with another amino acid residue comprising an olefin group to form a staple through the olefin group
  SITE 12: note = (S)-2-amino-3-(2-(trifluoromethyl)phenyl)propanoic acid
  SITE 13: note = (S)-2-amino-3-(benzo[b]thiophen-3-yl)propanoic acid
  SITE 14: note = L-alanine, useful for stapling/stapled with another amino acid residue comprising a triazolyl group to form a staple through the terminal methyl group
  SITE 14: note = C-term amino
XDXXDXAAFXXXXA

SEQ ID NO: 24 - protein, 14 aa, synthetic construct
  SITE 1: note = N-term Acetic Acid
  SITE 1: note = (R)-2-allylpyrrolidine-2-carboxylic acid, useful for stapling/stapled with another amino acid residue comprising an olefin group to form a staple through the olefin group
  SITE 3: note = (S)-2-amino-4,4-dimethylpentanoic acid
  VARIANT 4: note = 2-amino-2-(pent-4-en-1-yl)hept-6-enoic acid, useful for stapling/stapled with another amino acid residue comprising an olefin group to form a staple through one of the two olefin groups and/or with another amino acid residue comprising an olefin group to form a staple through the other of the two olefin groups
  SITE 10: note = L-alanine, useful for stapling/stapled with another amino acid residue comprising a triazolyl group to form a staple through the terminal methyl group
  SITE 11: note (S)-3-amino-1-((pent-4-en-1-yloxy)carbonyl)pyrrolidine-3-ca rboxylic acid, useful for stapling/stapled with another amino acid residue comprising an olefin group to form a staple through the olefin group
  SITE 12: note = (S)-2-amino-3-(thiophen-3-yl)propanoic acid
  SITE 13: note = (S)-2-amino-3-(benzo[b]thiophen-3-yl)propanoic acid
  SITE 14: note = (S)-2-amino-6-(1H-1,2,3-triazol-1-yl)hexanoic acid, useful for stapling/stapled with another amino acid residue to form a staple through the 4-position of the triazolyl group
  SITE 14: note = C-term amino
XDXXDDAAFAXXXX

SEQ ID NO: 25 - protein, 14 aa, synthetic construct
  SITE 1: note = N-term Acetic Acid
  SITE 1: note = (R)-2-allylpyrrolidine-2-carboxylic acid, useful for stapling/stapled with another amino acid residue comprising an olefin group to form a staple through the olefin group
  SITE 3: note = (S)-2-amino-4,4-dimethylpentanoic acid
  VARIANT 4: note = 2-amino-2-(pent-4-en-1-yl)hept-6-enoic acid, useful for stapling/stapled with another amino acid residue comprising an olefin group to form a staple through one of the two olefin groups and/or with another amino acid residue comprising an olefin group to form a staple through the other of the two olefin groups
  SITE 6: note = (S)-3-(2-amino-2-carboxyethyl)benzoic acid
  SITE 10: note = L-alanine, useful for stapling/stapled with another amino acid residue comprising a triazolyl group to form a staple through the terminal methyl group
  SITE 11: note (S)-3-amino-1-((pent-4-en-1-yloxy)carbonyl)pyrrolidine-3-ca rboxylic acid, useful for stapling/stapled with another amino acid residue comprising an olefin group to form a staple through the olefin group
  SITE 12: note = (S)-2-amino-3-(thiophen-3-yl)propanoic acid
  SITE 13: note = (S)-2-amino-3-(benzo[b]thiophen-3-yl)propanoic acid
  SITE 14: note = (S)-2-amino-6-(1H-1,2,3-triazol-1-yl)hexanoic acid, useful for stapling/stapled with another amino acid residue to form a staple through the 4-position of the triazolyl group
  SITE 14: note = C-term amino
XDXXDXAAFAXXXX

SEQ ID NO: 26 - protein, 14 aa, synthetic construct
  SITE 1: note = N-term Acetic Acid
  SITE 1: note = (R)-2-allylpyrrolidine-2-carboxylic acid, useful for stapling/stapled with another amino acid residue comprising an olefin group to form a staple through the olefin group
  SITE 3: note = (S)-2-amino-4,4-dimethylpentanoic acid
  VARIANT 4: note = 2-amino-2-(pent-4-en-1-yl)hept-6-enoic acid, useful for stapling/stapled with another amino acid residue comprising an olefin group to form a staple through one of the two olefin groups and/or with another amino acid residue comprising an olefin group to form a staple through the other of the two olefin groups
  SITE 6: note = (S)-3-(2-amino-2-carboxyethyl)benzoic acid
  SITE 10: note = L-alanine, useful for stapling/stapled with another amino acid residue comprising a triazolyl group to form a staple through the terminal methyl group
  SITE 11: note (S)-3-amino-1-((pent-4-en-1-yloxy)carbonyl)pyrrolidine-3-ca rboxylic acid, useful for stapling/stapled with another amino acid residue comprising an olefin group to form a staple through the olefin group
  SITE 12: note = (S)-2-amino-3-(2-(trifluoromethyl)phenyl)propanoic acid
  SITE 13: note = (S)-2-amino-3-(benzo[b]thiophen-3-yl)propanoic acid
  SITE 14: note = (S)-2-amino-6-(1H-1,2,3-triazol-1-yl)hexanoic acid, useful for stapling/stapled with another amino acid residue to form a staple through the 4-position of the triazolyl group
  SITE 14: note = C-term amino
XDXXDXAAFAXXXX

SEQ ID NO: 27 - protein, 14 aa, synthetic construct
  SITE 1: note = N-term Acetic Acid
  SITE 1: note = (R)-2-allylpyrrolidine-2-carboxylic acid, useful for stapling/stapled with another amino acid residue comprising an olefin group to form a staple through the olefin group
  SITE 3: note = (S)-2-amino-4,4-dimethylpentanoic acid
  VARIANT 4: note = 2-amino-2-(pent-4-en-1-yl)hept-6-enoic acid, useful for stapling/stapled with another amino acid residue comprising an olefin group to form a staple through one of the two olefin groups and/or with another amino acid residue comprising an olefin group to form a staple through the other of the two olefin groups
  SITE 7: note = L-alanine, useful for stapling/stapled with another amino acid residue comprising a triazolyl group to form a staple through the terminal methyl group
  SITE 10: note = (S)-2-amino-6-(1H-1,2,3-triazol-1-yl)hexanoic acid, useful for stapling/stapled with another amino acid residue to form a staple through the 4-position of the triazolyl group
  SITE 11: note (S)-3-amino-1-((pent-4-en-1-yloxy)carbonyl)pyrrolidine-3-ca rboxylic acid, useful for stapling/stapled with another amino acid residue comprising an olefin group to form a staple through the olefin group
  SITE 12: note = (S)-2-amino-3-(thiophen-3-yl)propanoic acid
  SITE 13: note = (S)-2-amino-3-(benzo[b]thiophen-3-yl)propanoic acid
  SITE 14: note = C-term amino
XDXXDDAAFXXXXQ

SEQ ID NO: 28 - protein, 14 aa, synthetic construct
  SITE 1: note = N-term Acetic Acid
  SITE 1: note = (R)-2-allylpyrrolidine-2-carboxylic acid, useful for stapling/stapled with another amino acid residue comprising an olefin group to form a staple through the olefin group
  SITE 3: note = (S)-2-amino-4,4-dimethylpentanoic acid
  VARIANT 4: note = 2-amino-2-(pent-4-en-1-yl)hept-6-enoic acid, useful for stapling/stapled with another amino acid residue comprising an olefin group to form a staple through one of the two olefin groups and/or with another amino acid residue comprising an olefin group to form a staple through the other of the two olefin groups
  SITE 6: note = (S)-3-(2-amino-2-carboxyethyl)benzoic acid
  SITE 7: note = L-alanine, useful for stapling/stapled with another amino acid residue comprising a triazolyl group to form a staple through the terminal methyl group
  SITE 10: note = (S)-2-amino-6-(1H-1,2,3-triazol-1-yl)hexanoic acid, useful for stapling/stapled with another amino acid residue to form a staple through the 4-position of the triazolyl group
  SITE 11: note (S)-3-amino-1-((pent-4-en-1-yloxy)carbonyl)pyrrolidine-3-ca rboxylic acid, useful for stapling/stapled with another amino acid residue comprising an olefin group to form a staple through the olefin group
  SITE 12: note = (S)-2-amino-3-(thiophen-3-yl)propanoic acid
  SITE 13: note = (S)-2-amino-3-(benzo[b]thiophen-3-yl)propanoic acid
  SITE 14: note = C-term amino
XDXXDXAAFXXXXQ

SEQ ID NO: 29 - protein, 14 aa, synthetic construct
  SITE 1: note = N-term Acetic Acid
  SITE 1: note = (R)-2-allylpyrrolidine-2-carboxylic acid, useful for stapling/stapled with another amino acid residue comprising an olefin group to form a staple through the olefin group
  SITE 3: note = (S)-2-amino-4,4-dimethylpentanoic acid
  VARIANT 4: note = 2-amino-2-(pent-4-en-1-yl)hept-6-enoic acid, useful for stapling/stapled with another amino acid residue comprising an olefin group to form a staple through one of the two olefin groups and/or with another amino acid residue comprising an olefin group to form a staple through the other of the two olefin groups
  SITE 6: note = (S)-3-(2-amino-2-carboxyethyl)benzoic acid
  SITE 7: note = L-alanine, useful for stapling/stapled with another amino acid residue comprising a triazolyl group to form a staple through the terminal methyl group
  SITE 10: note = (S)-2-amino-6-(1H-1,2,3-triazol-1-yl)hexanoic acid, useful for stapling/stapled with another amino acid residue to form a staple through the 4-position of the triazolyl group
  SITE 11: note (S)-3-amino-1-((pent-4-en-1-yloxy)carbonyl)pyrrolidine-3-ca rboxylic acid, useful for stapling/stapled with another amino acid residue comprising an olefin group to form a staple through the olefin group
  SITE 12: note = (S)-2-amino-3-(2-(trifluoromethyl)phenyl)propanoic acid
  SITE 13: note = (S)-2-amino-3-(benzo[b]thiophen-3-yl)propanoic acid
  SITE 14: note = C-term amino
XDXXDXAAFXXXXQ

SEQ ID NO: 30 - protein, 14 aa, synthetic construct
  SITE 1: note = N-term Acetic Acid
  SITE 1: note = (R)-2-allylpyrrolidine-2-carboxylic acid, useful for stapling/stapled with another amino acid residue comprising an olefin group to form a staple through the olefin group
  SITE 3: note = (S)-2-amino-4,4-dimethylpentanoic acid
  VARIANT 4: note = 2-amino-2-(pent-4-en-1-yl)hept-6-enoic acid, useful for stapling/stapled with another amino acid residue comprising an olefin group to form a staple through one of the two olefin groups and/or with another amino acid residue comprising an olefin group to form a staple through the other of the two olefin groups
  SITE 7: note = (S)-2-amino-6-(1H-1,2,3-triazol-1-yl)hexanoic acid, useful for stapling/stapled with another amino acid residue to form a staple through the 4-position of the triazolyl group
  SITE 10: note = L-alanine, useful for stapling/stapled with another amino acid residue comprising a triazolyl group to form a staple through the terminal methyl group
  SITE 11: note (S)-3-amino-1-((pent-4-en-1-yloxy)carbonyl)pyrrolidine-3-ca rboxylic acid, useful for stapling/stapled with another amino acid residue comprising an olefin group to form a staple through the olefin group
  SITE 12: note = (S)-2-amino-3-(thiophen-3-yl)propanoic acid
  SITE 13: note = (S)-2-amino-3-(benzo[b]thiophen-3-yl)propanoic acid
  SITE 14: note = C-term amino
XDXXDDXAFAXXXQ

SEQ ID NO: 31 - protein, 14 aa, synthetic construct
  SITE 1: note = N-term Acetic Acid
  SITE 1: note = (R)-2-allylpyrrolidine-2-carboxylic acid, useful for stapling/stapled with another amino acid residue comprising an olefin group to form a staple through the olefin group
  SITE 3: note = (S)-2-amino-4,4-dimethylpentanoic acid
  VARIANT 4: note = 2-amino-2-(pent-4-en-1-yl)hept-6-enoic acid, useful for stapling/stapled with another amino acid residue comprising an olefin group to form a staple through one of the two olefin groups and/or with another amino acid residue comprising an olefin group to form a staple through the other of the two olefin groups
  SITE 6: note = (S)-3-(2-amino-2-carboxyethyl)benzoic acid
  SITE 7: note = (S)-2-amino-6-(1H-1,2,3-triazol-1-yl)hexanoic acid, useful for stapling/stapled with another amino acid residue to form a staple through the 4-position of the triazolyl group
  SITE 10: note = L-alanine, useful for stapling/stapled with another amino acid residue comprising a triazolyl group to form a staple through the terminal methyl group
  SITE 11: note (S)-3-amino-1-((pent-4-en-1-yloxy)carbonyl)pyrrolidine-3-ca rboxylic acid, useful for stapling/stapled with another amino acid residue comprising an olefin group to form a staple through the olefin group
  SITE 12: note = (S)-2-amino-3-(thiophen-3-yl)propanoic acid
  SITE 13: note = (S)-2-amino-3-(benzo[b]thiophen-3-yl)propanoic acid
  SITE 14: note = C-term amino
XDXXDXXAFAXXXQ

SEQ ID NO: 32 - protein, 14 aa, synthetic construct
  SITE 1: note = N-term Acetic Acid
  SITE 1: note = (R)-2-allylpyrrolidine-2-carboxylic acid, useful for stapling/stapled with another amino acid residue comprising an olefin group to form a staple through the olefin group
  SITE 3: note = (S)-2-amino-4,4-dimethylpentanoic acid
  VARIANT 4: note = 2-amino-2-(pent-4-en-1-yl)hept-6-enoic acid, useful for stapling/stapled with another amino acid residue comprising an olefin group to form a staple through one of the two olefin groups and/or with another amino acid residue comprising an olefin group to form a staple through the other of the two olefin groups
  SITE 6: note = (S)-3-(2-amino-2-carboxyethyl)benzoic acid
  SITE 7: note = (S)-2-amino-6-(1H-1,2,3-triazol-1-yl)hexanoic acid, useful for stapling/stapled with another amino acid residue to form a staple through the 4-position of the triazolyl group
  SITE 10: note = L-alanine, useful for stapling/stapled with another amino acid residue comprising a triazolyl group to form a staple through the terminal methyl group
  SITE 11: note (S)-3-amino-1-((pent-4-en-1-yloxy)carbonyl)pyrrolidine-3-ca rboxylic acid, useful for stapling/stapled with another amino acid residue comprising an olefin group to form a staple through the olefin group
  SITE 12: note = (S)-2-amino-3-(2-(trifluoromethyl)phenyl)propanoic acid
  SITE 13: note = (S)-2-amino-3-(benzo[b]thiophen-3-yl)propanoic acid
  SITE 14: note = C-term amino
XDXXDXXAFAXXXQ

SEQ ID NO: 33 - protein, 14 aa, synthetic construct
  SITE 1: note = N-term Acetic Acid
  SITE 1: note = (R)-2-allylpyrrolidine-2-carboxylic acid, useful for stapling/stapled with another amino acid residue comprising an olefin group to form a staple through the olefin group
  SITE 3: note = (S)-2-amino-4,4-dimethylpentanoic acid
  VARIANT 4: note = 2-amino-2-(pent-4-en-1-yl)hept-6-enoic acid, useful for stapling/stapled with another amino acid residue comprising an olefin group to form a staple through one of the two olefin groups and/or with another amino acid residue comprising an olefin group to form a staple through the other of the two olefin groups
  SITE 6: note = (S)-3-(2-amino-2-carboxyethyl)benzoic acid
  SITE 10: note = L-lysine, useful for stapling/stapled with another amino acid residue comprising a side chain acid group to form a staple through the 6-amino group
  SITE 11: note (S)-3-amino-1-((pent-4-en-1-yloxy)carbonyl)pyrrolidine-3-ca rboxylic acid, useful for stapling/stapled with another amino acid residue comprising an olefin group to form a staple through the olefin group
  SITE 12: note = (S)-2-amino-3-(thiophen-3-yl)propanoic acid
  SITE 13: note = (S)-2-amino-3-(benzo[b]thiophen-3-yl)propanoic acid
  SITE 14: note = L-glutamic acid, useful for stapling/stapled with another amino acid residue comprising a side chain amino group to form a staple through the 4-carboxyl group
  SITE 14: note = C-term amino
XDXXDXAAFKXXXE

SEQ ID NO: 34 - protein, 14 aa, synthetic construct
  SITE 1: note = N-term Acetic Acid
  SITE 1: note = (R)-2-allylpyrrolidine-2-carboxylic acid, useful for stapling/stapled with another amino acid residue comprising an olefin group to form a staple through the olefin group
  SITE 3: note = (S)-2-amino-4,4-dimethylpentanoic acid
  VARIANT 4: note = 2-amino-2-(pent-4-en-1-yl)hept-6-enoic acid, useful for stapling/stapled with another amino acid residue comprising an olefin group to form a staple through one of the two olefin groups and/or with another amino acid residue comprising an olefin group to form a staple through the other of the two olefin groups
  SITE 6: note = (S)-3-(2-amino-2-carboxyethyl)benzoic acid
  SITE 10: note = L-glutamic acid, useful for stapling/stapled with another amino acid residue comprising a side chain amino group to form a staple through the 4-carboxyl group
  SITE 11: note (S)-3-amino-1-((pent-4-en-1-yloxy)carbonyl)pyrrolidine-3-ca rboxylic acid, useful for stapling/stapled with another amino acid residue comprising an olefin group to form a staple through the olefin group
  SITE 12: note = (S)-2-amino-3-(thiophen-3-yl)propanoic acid
  SITE 13: note = (S)-2-amino-3-(benzo[b]thiophen-3-yl)propanoic acid
  SITE 14: note = L-lysine, useful for stapling/stapled with another amino acid residue comprising a side chain acid group to form a staple through the 6-amino group
  SITE 14: note = C-term amino
XDXXDXAAFEXXXK

SEQ ID NO: 35 - protein, 14 aa, synthetic construct
  SITE 1: note = N-term Acetic Acid
  SITE 1: note = (R)-2-allylpyrrolidine-2-carboxylic acid, useful for stapling/stapled with another amino acid residue comprising an olefin group to form a staple through the olefin group
  SITE 3: note = (S)-2-amino-4,4-dimethylpentanoic acid
  VARIANT 4: note = 2-amino-2-(pent-4-en-1-yl)hept-6-enoic acid, useful for stapling/stapled with another amino acid residue comprising an olefin group to form a staple through one of the two olefin groups and/or with another amino acid residue comprising an olefin group to form a staple through the other of the two olefin groups
  SITE 6: note = (S)-3-(2-amino-2-carboxyethyl)benzoic acid
  SITE 10: note = L-lysine, useful for stapling/stapled with another amino acid residue comprising a side chain acid group to form a staple through the 6-amino group
  SITE 11: note (S)-3-amino-1-((pent-4-en-1-yloxy)carbonyl)pyrrolidine-3-ca rboxylic acid, useful for stapling/stapled with another amino acid residue comprising an olefin group to form a staple through the olefin group
  SITE 12: note = (S)-2-amino-3-(thiophen-3-yl)propanoic acid
  SITE 13: note = (S)-2-amino-3-(benzo[b]thiophen-3-yl)propanoic acid
  SITE 14: note = L-aspartic acid, useful for stapling/stapled with another amino acid residue comprising a side chain amino group to form a staple through the acid group in the side chain
  SITE 14: note = C-term amino
XDXXDXAAFKXXXD

SEQ ID NO: 36 - protein, 14 aa, synthetic construct
  SITE 1: note = N-term Acetic Acid
  SITE 1: note = (R)-2-allylpyrrolidine-2-carboxylic acid, useful for stapling/stapled with another amino acid residue comprising an olefin group to form a staple through the olefin group
  SITE 3: note = (S)-2-amino-4,4-dimethylpentanoic acid
  VARIANT 4: note = 2-amino-2-(pent-4-en-1-yl)hept-6-enoic acid, useful for stapling/stapled with another amino acid residue comprising an olefin group to form a staple through one of the two olefin groups and/or with another amino acid residue comprising an olefin group to form a staple through the other of the two olefin groups
  SITE 6: note = (S)-3-(2-amino-2-carboxyethyl)benzoic acid
  SITE 10: note = L-aspartic acid, useful for stapling/stapled with another amino acid residue comprising a side chain amino group to form a staple through the acid group in the side chain
  SITE 11: note (S)-3-amino-1-((pent-4-en-1-yloxy)carbonyl)pyrrolidine-3-ca rboxylic acid, useful for stapling/stapled with another amino acid residue comprising an olefin group to form a staple through the olefin group
  SITE 12: note = (S)-2-amino-3-(thiophen-3-yl)propanoic acid
  SITE 13: note = (S)-2-amino-3-(benzo[b]thiophen-3-yl)propanoic acid
  SITE 14: note = L-lysine, useful for stapling/stapled with another amino acid residue comprising a side chain acid group to form a staple through the 6-amino group
  SITE 14: note = C-term amino
XDXXDXAAFDXXXK

SEQ ID NO: 37 - protein, 14 aa, synthetic construct
  SITE 1: note = N-term Acetic Acid
  SITE 1: note = (R)-2-allylpyrrolidine-2-carboxylic acid, useful for stapling/stapled with another amino acid residue comprising an olefin group to form a staple through the olefin group
  SITE 3: note = (S)-2-amino-4,4-dimethylpentanoic acid
  VARIANT 4: note = 2-amino-2-(pent-4-en-1-yl)hept-6-enoic acid, useful for stapling/stapled with another amino acid residue comprising an olefin group to form a staple through one of the two olefin groups and/or with another amino acid residue comprising an olefin group to form a staple through the other of the two olefin groups
  SITE 6: note = (S)-3-(2-amino-2-carboxyethyl)benzoic acid
  SITE 10: note = (S)-2,5-diaminopentanoic acid, useful for stapling/stapled with another amino acid residue comprising a side chain acid group to form a staple through the 5-amino group
  SITE 11: note (S)-3-amino-1-((pent-4-en-1-yloxy)carbonyl)pyrrolidine-3-ca rboxylic acid, useful for stapling/stapled with another amino acid residue comprising an olefin group to form a staple through the olefin group
  SITE 12: note = (S)-2-amino-3-(thiophen-3-yl)propanoic acid
  SITE 13: note = (S)-2-amino-3-(benzo[b]thiophen-3-yl)propanoic acid
  SITE 14: note = L-glutamic acid, useful for stapling/stapled with another amino acid residue comprising a side chain amino group to form a staple through the 4-carboxyl group
  SITE 14: note = C-term amino
XDXXDXAAFXXXXE

SEQ ID NO: 38 - protein, 14 aa, synthetic construct
  SITE 1: note = N-term Acetic Acid
  SITE 1: note = (R)-2-allylpyrrolidine-2-carboxylic acid, useful for stapling/stapled with another amino acid residue comprising an olefin group to form a staple through the olefin group
  SITE 3: note = (S)-2-amino-4,4-dimethylpentanoic acid
  VARIANT 4: note = 2-amino-2-(pent-4-en-1-yl)hept-6-enoic acid, useful for stapling/stapled with another amino acid residue comprising an olefin group to form a staple through one of the two olefin groups and/or with another amino acid residue comprising an olefin group to form a staple through the other of the two olefin groups
  SITE 6: note = (S)-3-(2-amino-2-carboxyethyl)benzoic acid
  SITE 10: note = L-glutamic acid, useful for stapling/stapled with another amino acid residue comprising a side chain amino group to form a staple through the 4-carboxyl group
  SITE 11: note (S)-3-amino-1-((pent-4-en-1-yloxy)carbonyl)pyrrolidine-3-ca rboxylic acid, useful for stapling/stapled with another amino acid residue comprising an olefin group to form a staple through the olefin group
  SITE 12: note = (S)-2-amino-3-(thiophen-3-yl)propanoic acid
  SITE 13: note = (S)-2-amino-3-(benzo[b]thiophen-3-yl)propanoic acid
  SITE 14: note = (S)-2,5-diaminopentanoic acid, useful for stapling/stapled with another amino acid residue comprising a side chain acid group to form a staple through the 5-amino group
  SITE 14: note = C-term amino
XDXXDXAAFEXXXX

SEQ ID NO: 39 - protein, 14 aa, synthetic construct
  SITE 1: note = N-term Acetic Acid
  SITE 1: note = (R)-2-allylpyrrolidine-2-carboxylic acid, useful for stapling/stapled with another amino acid residue comprising an olefin group to form a staple through the olefin group
  SITE 3: note = (S)-2-amino-4,4-dimethylpentanoic acid
  VARIANT 4: note = 2-amino-2-(pent-4-en-1-yl)hept-6-enoic acid, useful for stapling/stapled with another amino acid residue comprising an olefin group to form a staple through one of the two olefin groups and/or with another amino acid residue comprising an olefin group to form a staple through the other of the two olefin groups
  SITE 6: note = (S)-3-(2-amino-2-carboxyethyl)benzoic acid
  SITE 10: note = (S)-2,5-diaminopentanoic acid, useful for stapling/stapled with another amino acid residue comprising a side chain acid group to form a staple through the 5-amino group
  SITE 11: note (S)-3-amino-1-((pent-4-en-1-yloxy)carbonyl)pyrrolidine-3-ca rboxylic acid, useful for stapling/stapled with another amino acid residue comprising an olefin group to form a staple through the olefin group
  SITE 12: note = (S)-2-amino-3-(thiophen-3-yl)propanoic acid
  SITE 13: note = (S)-2-amino-3-(benzo[b]thiophen-3-yl)propanoic acid
  SITE 14: note = L-aspartic acid, useful for stapling/stapled with another amino acid residue comprising a side chain amino group to form a staple through the acid group in the side chain
  SITE 14: note = C-term amino
XDXXDXAAFXXXXD

SEQ ID NO: 40 - protein, 14 aa, synthetic construct
  SITE 1: note = N-term Acetic Acid
  SITE 1: note = (R)-2-allylpyrrolidine-2-carboxylic acid, useful for stapling/stapled with another amino acid residue comprising an olefin group to form a staple through the olefin group
  SITE 3: note = (S)-2-amino-4,4-dimethylpentanoic acid
  VARIANT 4: note = 2-amino-2-(pent-4-en-1-yl)hept-6-enoic acid, useful for stapling/stapled with another amino acid residue comprising an olefin group to form a staple through one of the two olefin groups and/or with another amino acid residue comprising an olefin group to form a staple through the other of the two olefin groups
  SITE 6: note = (S)-3-(2-amino-2-carboxyethyl)benzoic acid
  SITE 10: note = L-aspartic acid, useful for stapling/stapled with another amino acid residue comprising a side chain amino group to form a staple through the acid group in the side chain
  SITE 11: note (S)-3-amino-1-((pent-4-en-1-yloxy)carbonyl)pyrrolidine-3-ca rboxylic acid, useful for stapling/stapled with another amino acid residue comprising an olefin group to form a staple through the olefin group
  SITE 12: note = (S)-2-amino-3-(thiophen-3-yl)propanoic acid
  SITE 13: note = (S)-2-amino-3-(benzo[b]thiophen-3-yl)propanoic acid
  SITE 14: note = (S)-2,5-diaminopentanoic acid, useful for stapling/stapled with another amino acid residue comprising a side chain acid group to form a staple through the 5-amino group
  SITE 14: note = C-term amino
XDXXDXAAFDXXXX

SEQ ID NO: 41 - protein, 15 aa, synthetic construct
  SITE 1: note = N-term Acetic Acid
  SITE 1: note = (R)-2-allylpyrrolidine-2-carboxylic acid, useful for stapling/stapled with another amino acid residue comprising an olefin group to form a staple through the olefin group
  SITE 3: note = (S)-2-amino-4,4-dimethylpentanoic acid
  VARIANT 4: note = 2-amino-2-(pent-4-en-1-yl)hept-6-enoic acid, useful for stapling/stapled with another amino acid residue comprising an olefin group to form a staple through one of the two olefin groups and/or with another amino acid residue comprising an olefin group to form a staple through the other of the two olefin groups
  SITE 6: note = (S)-3-(2-amino-2-carboxyethyl)benzoic acid
  SITE 10: note = L-lysine, useful for stapling/stapled with another amino acid residue comprising a side chain acid group to form a staple through the 6-amino group
  SITE 11: note (S)-3-amino-1-((pent-4-en-1-yloxy)carbonyl)pyrrolidine-3-ca rboxylic acid, useful for stapling/stapled with another amino acid residue comprising an olefin group to form a staple through the olefin group
  SITE 12: note = (S)-2-amino-3-(thiophen-3-yl)propanoic acid
  SITE 13: note = (S)-2-amino-3-(benzo[b]thiophen-3-yl)propanoic acid
  SITE 14: note = L-glutamic acid, useful for stapling/stapled with another amino acid residue comprising a side chain amino group to form a staple through the 4-carboxyl group
  SITE 15: note = C-term amino
XDXXDXAAFKXXXEA

SEQ ID NO: 42 - protein, 15 aa, synthetic construct
  SITE 1: note = N-term Acetic Acid
  SITE 1: note = (R)-2-allylpyrrolidine-2-carboxylic acid, useful for stapling/stapled with another amino acid residue comprising an olefin group to form a staple through the olefin group
  SITE 3: note = (S)-2-amino-4,4-dimethylpentanoic acid
  VARIANT 4: note = 2-amino-2-(pent-4-en-1-yl)hept-6-enoic acid, useful for stapling/stapled with another amino acid residue comprising an olefin group to form a staple through one of the two olefin groups and/or with another amino acid residue comprising an olefin group to form a staple through the other of the two olefin groups
  SITE 6: note = (S)-3-(2-amino-2-carboxyethyl)benzoic acid
  SITE 10: note = L-glutamic acid, useful for stapling/stapled with another amino acid residue comprising a side chain amino group to form a staple through the 4-carboxyl group
  SITE 11: note (S)-3-amino-1-((pent-4-en-1-yloxy)carbonyl)pyrrolidine-3-ca rboxylic acid, useful for stapling/stapled with another amino acid residue comprising an olefin group to form a staple through the olefin group
  SITE 12: note = (S)-2-amino-3-(thiophen-3-yl)propanoic acid
  SITE 13: note = (S)-2-amino-3-(benzo[b]thiophen-3-yl)propanoic acid
  SITE 14: note = L-lysine, useful for stapling/stapled with another amino acid residue comprising a side chain acid group to form a staple through the 6-amino group
  SITE 15: note = C-term amino
XDXXDXAAFEXXXKA

SEQ ID NO: 43 - protein, 15 aa, synthetic construct
  SITE 1: note = N-term Acetic Acid
  SITE 1: note = (R)-2-allylpyrrolidine-2-carboxylic acid, useful for stapling/stapled with another amino acid residue comprising an olefin group to form a staple through the olefin group
  SITE 3: note = (S)-2-amino-4,4-dimethylpentanoic acid
  VARIANT 4: note = 2-amino-2-(pent-4-en-1-yl)hept-6-enoic acid, useful for stapling/stapled with another amino acid residue comprising an olefin group to form a staple through one of the two olefin groups and/or with another amino acid residue comprising an olefin group to form a staple through the other of the two olefin groups
  SITE 6: note = (S)-3-(2-amino-2-carboxyethyl)benzoic acid
  SITE 10: note = L-aspartic acid, useful for stapling/stapled with another amino acid residue comprising a side chain amino group to form a staple through the acid group in the side chain
  SITE 11: note (S)-3-amino-1-((pent-4-en-1-yloxy)carbonyl)pyrrolidine-3-ca rboxylic acid, useful for stapling/stapled with another amino acid residue comprising an olefin group to form a staple through the olefin group
  SITE 12: note = (S)-2-amino-3-(thiophen-3-yl)propanoic acid
  SITE 13: note = (S)-2-amino-3-(benzo[b]thiophen-3-yl)propanoic acid
  SITE 14: note = L-lysine, useful for stapling/stapled with another amino acid residue comprising a side chain acid group to form a staple through the 6-amino group
  SITE 15: note = C-term amino
XDXXDXAAFDXXXKA

SEQ ID NO: 44 - protein, 14 aa, synthetic construct
  SITE 1: note = N-term Acetic Acid
  SITE 1: note = (R)-2-allylpyrrolidine-2-carboxylic acid, useful for stapling/stapled with another amino acid residue comprising an olefin group to form a staple through the olefin group
  SITE 3: note = (S)-2-amino-4,4-dimethylpentanoic acid
  VARIANT 4: note = 2-amino-2-(pent-4-en-1-yl)hept-6-enoic acid, useful for stapling/stapled with another amino acid residue comprising an olefin group to form a staple through one of the two olefin groups and/or with another amino acid residue comprising an olefin group to form a staple through the other of the two olefin groups
  SITE 6: note = (S)-3-(2-amino-2-carboxyethyl)benzoic acid
  SITE 7: note = (S)-3-((5-amino-5-carboxypentyl)carbamoyl)benzoic acid, useful for stapling/stapled with another amino acid residue comprising a side chain amino group to form a staple through the acid group in the side chain
  SITE 11: note (S)-3-amino-1-((pent-4-en-1-yloxy)carbonyl)pyrrolidine-3-ca rboxylic acid, useful for stapling/stapled with another amino acid residue comprising an olefin group to form a staple through the olefin group
  SITE 12: note = (S)-2-amino-3-(thiophen-3-yl)propanoic acid
  SITE 13: note = (S)-2-amino-3-(benzo[b]thiophen-3-yl)propanoic acid
  SITE 14: note = C-term amino
XDXXDXXAFLXXXK

SEQ ID NO: 45 - protein, 14 aa, synthetic construct
  SITE 1: note = N-term Acetic Acid
  SITE 1: note = (R)-2-allylpyrrolidine-2-carboxylic acid, useful for stapling/stapled with another amino acid residue comprising an olefin group to form a staple through the olefin group
  SITE 3: note = (S)-2-amino-4,4-dimethylpentanoic acid
  VARIANT 4: note = 2-amino-2-(pent-4-en-1-yl)hept-6-enoic acid, useful for stapling/stapled with another amino acid residue comprising an olefin group to form a staple through one of the two olefin groups and/or with another amino acid residue comprising an olefin group to form a staple through the other of the two olefin groups
  SITE 6: note = (S)-3-(2-amino-2-carboxyethyl)benzoic acid
  SITE 7: note = N6-(3-carboxypropanoyl)-L-lysine, useful for stapling/stapled with another amino acid residue comprising a side chain amino group to form a staple through the acid group in the side chain
  SITE 11: note (S)-3-amino-1-((pent-4-en-1-yloxy)carbonyl)pyrrolidine-3-ca rboxylic acid, useful for stapling/stapled with another amino acid residue comprising an olefin group to form a staple through the olefin group
  SITE 12: note = (S)-2-amino-3-(thiophen-3-yl)propanoic acid
  SITE 13: note = (S)-2-amino-3-(benzo[b]thiophen-3-yl)propanoic acid
  SITE 14: note = C-term amino
XDXXDXKAFLXXXK

SEQ ID NO: 46 - protein, 14 aa, synthetic construct
  SITE 1: note = N-term Acetic Acid
  SITE 1: note = (R)-2-allylpyrrolidine-2-carboxylic acid, useful for stapling/stapled with another amino acid residue comprising an olefin group to form a staple through the olefin group
  SITE 3: note = (S)-2-amino-4,4-dimethylpentanoic acid
  VARIANT 4: note = 2-amino-2-(pent-4-en-1-yl)hept-6-enoic acid, useful for stapling/stapled with another amino acid residue comprising an olefin group to form a staple through one of the two olefin groups and/or with another amino acid residue comprising an olefin group to form a staple through the other of the two olefin groups
  SITE 6: note = (S)-3-(2-amino-2-carboxyethyl)benzoic acid
  SITE 7: note = N6-(2-carboxy-2-methylpropanoyl)-L-lysine, useful for stapling/stapled with another amino acid residue comprising a side chain amino group to form a staple through the acid group in the side chain
  SITE 11: note (S)-3-amino-1-((pent-4-en-1-yloxy)carbonyl)pyrrolidine-3-ca rboxylic acid, useful for stapling/stapled with another amino acid residue comprising an olefin group to form a staple through the olefin group
  SITE 12: note = (S)-2-amino-3-(thiophen-3-yl)propanoic acid
  SITE 13: note = (S)-2-amino-3-(benzo[b]thiophen-3-yl)propanoic acid
  SITE 14: note = C-term amino
XDXXDXKAFLXXXK

SEQ ID NO: 47 - protein, 14 aa, synthetic construct
  SITE 1: note = N-term Acetic Acid
  SITE 1: note = (R)-2-allylpyrrolidine-2-carboxylic acid, useful for stapling/stapled with another amino acid residue comprising an olefin group to form a staple through the olefin group
  SITE 3: note = (S)-2-amino-4,4-dimethylpentanoic acid
  VARIANT 4: note = 2-amino-2-(pent-4-en-1-yl)hept-6-enoic acid, useful for stapling/stapled with another amino acid residue comprising an olefin group to form a staple through one of the two olefin groups and/or with another amino acid residue comprising an olefin group to form a staple through the other of the two olefin groups
  SITE 6: note = (S)-3-(2-amino-2-carboxyethyl)benzoic acid
  SITE 7: note (S)-2'-((5-amino-5-carboxypentyl)carbamoyl)-[1,1'-biphenyl] -2- carboxylic acid, useful for stapling/stapled with another amino acid residue comprising a side chain amino group to form a staple through the acid group in the side chain
  SITE 11: note (S)-3-amino-1-((pent-4-en-1-yloxy)carbonyl)pyrrolidine-3-ca rboxylic acid, useful for stapling/stapled with another amino acid residue comprising an olefin group to form a staple through the olefin group
  SITE 12: note = (S)-2-amino-3-(thiophen-3-yl)propanoic acid
  SITE 13: note = (S)-2-amino-3-(benzo[b]thiophen-3-yl)propanoic acid
  SITE 14: note = C-term amino
XDXXDXXAFLXXXK

SEQ ID NO: 48 - protein, 14 aa, synthetic construct
  SITE 1: note = N-term Acetic Acid
  SITE 1: note = (R)-2-allylpyrrolidine-2-carboxylic acid, useful for stapling/stapled with another amino acid residue comprising an olefin group to form a staple through the olefin group
  SITE 3: note = (S)-2-amino-4,4-dimethylpentanoic acid
  VARIANT 4: note = 2-amino-2-(pent-4-en-1-yl)hept-6-enoic acid, useful for stapling/stapled with another amino acid residue comprising an olefin group to form a staple through one of the two olefin groups and/or with another amino acid residue comprising an olefin group to form a staple through the other of the two olefin groups
  SITE 6: note = (S)-3-(2-amino-2-carboxyethyl)benzoic acid
  SITE 7: note (S)-3'-((5-amino-5-carboxypentyl)carbamoyl)-[1,1'-biphenyl] -3-carboxylic acid, useful for stapling/stapled with another amino acid residue comprising a side chain amino group to form a staple through the acid group in the side chain
  SITE 11: note (S)-3-amino-1-((pent-4-en-1-yloxy)carbonyl)pyrrolidine-3-ca rboxylic acid, useful for stapling/stapled with another amino acid residue comprising an olefin group to form a staple through the olefin group
  SITE 12: note = (S)-2-amino-3-(thiophen-3-yl)propanoic acid
  SITE 13: note = (S)-2-amino-3-(benzo[b]thiophen-3-yl)propanoic acid
  SITE 14: note = C-term amino
XDXXDXXAFLXXXK

SEQ ID NO: 49 - protein, 14 aa, synthetic construct
  SITE 1: note = N-term Acetic Acid
  SITE 1: note = (R)-2-allylpyrrolidine-2-carboxylic acid, useful for stapling/stapled with another amino acid residue comprising an olefin group to form a staple through the olefin group
  SITE 3: note = (S)-2-amino-4,4-dimethylpentanoic acid
  VARIANT 4: note = 2-amino-2-(pent-4-en-1-yl)hept-6-enoic acid, useful for stapling/stapled with another amino acid residue comprising an olefin group to form a staple through one of the two olefin groups and/or with another amino acid residue comprising an olefin group to form a staple through the other of the two olefin groups
  SITE 6: note = (S)-3-(2-amino-2-carboxyethyl)benzoic acid
  SITE 7: note = (S)-3-((5-amino-5-carboxypentyl)carbamoyl)benzoic acid, useful for stapling/stapled with another amino acid residue comprising a side chain amino group to form a staple through the acid group in the side chain
  SITE 11: note (S)-3-amino-1-((pent-4-en-1-yloxy)carbonyl)pyrrolidine-3-ca rboxylic acid, useful for stapling/stapled with another amino acid residue comprising an olefin group to form a staple through the olefin group
  SITE 12: note = (S)-2-amino-3-(2-chlorophenyl)propanoic acid
  SITE 13: note = (S)-2-amino-3-(benzo[b]thiophen-3-yl)propanoic acid
  SITE 14: note = C-term amino
XDXXDXXAFLXXXK

SEQ ID NO: 50 - protein, 14 aa, synthetic construct
  SITE 1: note = N-term Acetic Acid
  SITE 1: note = (R)-2-allylpyrrolidine-2-carboxylic acid, useful for stapling/stapled with another amino acid residue comprising an olefin group to form a staple through the olefin group
  SITE 3: note = (S)-2-amino-4,4-dimethylpentanoic acid
  VARIANT 4: note = 2-amino-2-(pent-4-en-1-yl)hept-6-enoic acid, useful for stapling/stapled with another amino acid residue comprising an olefin group to form a staple through one of the two olefin groups and/or with another amino acid residue comprising an olefin group to form a staple through the other of the two olefin groups
  SITE 6: note = (S)-3-(2-amino-2-carboxyethyl)benzoic acid
  SITE 7: note = N6-(3-carboxypropanoyl)-L-lysine, useful for stapling/stapled with another amino acid residue comprising a side chain amino group to form a staple through the acid group in the side chain
  SITE 11: note (S)-3-amino-1-((pent-4-en-1-yloxy)carbonyl)pyrrolidine-3-ca rboxylic acid, useful for stapling/stapled with another amino acid residue comprising an olefin group to form a staple through the olefin group
  SITE 12: note = (S)-2-amino-3-(2-chlorophenyl)propanoic acid
  SITE 13: note = (S)-2-amino-3-(benzo[b]thiophen-3-yl)propanoic acid
  SITE 14: note = C-term amino
XDXXDXKAFLXXXK

SEQ ID NO: 51 - protein, 14 aa, synthetic construct
  SITE 1: note = N-term Acetic Acid
  SITE 1: note = (R)-2-allylpyrrolidine-2-carboxylic acid, useful for stapling/stapled with another amino acid residue comprising an olefin group to form a staple through the olefin group
  SITE 3: note = (S)-2-amino-4,4-dimethylpentanoic acid
  VARIANT 4: note = 2-amino-2-(pent-4-en-1-yl)hept-6-enoic acid, useful for stapling/stapled with another amino acid residue comprising an olefin group to form a staple through one of the two olefin groups and/or with another amino acid residue comprising an olefin group to form a staple through the other of the two olefin groups
  SITE 6: note = (S)-3-(2-amino-2-carboxyethyl)benzoic acid
  SITE 7: note = N6-(2-carboxy-2-methylpropanoyl)-L-lysine, useful for stapling/stapled with another amino acid residue comprising a side chain amino group to form a staple through the acid group in the side chain
  SITE 11: note (S)-3-amino-1-((pent-4-en-1-yloxy)carbonyl)pyrrolidine-3-ca rboxylic acid, useful for stapling/stapled with another amino acid residue comprising an olefin group to form a staple through the olefin group
  SITE 12: note = (S)-2-amino-3-(2-chlorophenyl)propanoic acid
  SITE 13: note = (S)-2-amino-3-(benzo[b]thiophen-3-yl)propanoic acid
  SITE 14: note = C-term amino
XDXXDXKAFLXXXK

SEQ ID NO: 52 - protein, 14 aa, synthetic construct
  SITE 1: note = N-term Acetic Acid
  SITE 1: note = (R)-2-allylpyrrolidine-2-carboxylic acid, useful for stapling/stapled with another amino acid residue comprising an olefin group to form a staple through the olefin group
  SITE 3: note = (S)-2-amino-4,4-dimethylpentanoic acid
  VARIANT 4: note = 2-amino-2-(pent-4-en-1-yl)hept-6-enoic acid, useful for stapling/stapled with another amino acid residue comprising an olefin group to form a staple through one of the two olefin groups and/or with another amino acid residue comprising an olefin group to form a staple through the other of the two olefin groups
  SITE 6: note = (S)-3-(2-amino-2-carboxyethyl)benzoic acid
  SITE 7: note (S)-2'-((5-amino-5-carboxypentyl)carbamoyl)-[1,1'-biphenyl] -2- carboxylic acid, useful for stapling/stapled with another amino acid residue comprising a side chain amino group to form a staple through the acid group in the side chain
  SITE 11: note (S)-3-amino-1-((pent-4-en-1-yloxy)carbonyl)pyrrolidine-3-ca rboxylic acid, useful for stapling/stapled with another amino acid residue comprising an olefin group to form a staple through the olefin group
  SITE 12: note = (S)-2-amino-3-(2-chlorophenyl)propanoic acid
  SITE 13: note = (S)-2-amino-3-(benzo[b]thiophen-3-yl)propanoic acid
  SITE 14: note = C-term amino
XDXXDXXAFLXXXK

SEQ ID NO: 53 - protein, 14 aa, synthetic construct
  SITE 1: note = N-term Acetic Acid
  SITE 1: note = (R)-2-allylpyrrolidine-2-carboxylic acid, useful for stapling/stapled with another amino acid residue comprising an olefin group to form a staple through the olefin group
  SITE 3: note = (S)-2-amino-4,4-dimethylpentanoic acid
  VARIANT 4: note = 2-amino-2-(pent-4-en-1-yl)hept-6-enoic acid, useful for stapling/stapled with another amino acid residue comprising an olefin group to form a staple through one of the two olefin groups and/or with another amino acid residue comprising an olefin group to form a staple through the other of the two olefin groups
  SITE 6: note = (S)-3-(2-amino-2-carboxyethyl)benzoic acid
  SITE 7: note (S)-3'-((5-amino-5-carboxypentyl)carbamoyl)-[1,1'-biphenyl] -3-carboxylic acid, useful for stapling/stapled with another amino acid residue comprising a side chain amino group to form a staple through the acid group in the side chain
  SITE 11: note (S)-3-amino-1-((pent-4-en-1-yloxy)carbonyl)pyrrolidine-3-ca rboxylic acid, useful for stapling/stapled with another amino acid residue comprising an olefin group to form a staple through the olefin group
  SITE 12: note = (S)-2-amino-3-(2-chlorophenyl)propanoic acid
  SITE 13: note = (S)-2-amino-3-(benzo[b]thiophen-3-yl)propanoic acid
  SITE 14: note = C-term amino
XDXXDXXAFLXXXK

SEQ ID NO: 54 - protein, 14 aa, synthetic construct
  SITE 1: note = N-term Acetic Acid
  SITE 1: note = (R)-2-allylpyrrolidine-2-carboxylic acid, useful for stapling/stapled with another amino acid residue comprising an olefin group to form a staple through the olefin group
  SITE 3: note = (S)-2-amino-4,4-dimethylpentanoic acid
  VARIANT 4: note = 2-amino-2-(pent-4-en-1-yl)hept-6-enoic acid, useful for stapling/stapled with another amino acid residue comprising an olefin group to form a staple through one of the two olefin groups and/or with another amino acid residue comprising an olefin group to form a staple through the other of the two olefin groups
  SITE 6: note = (S)-3-(2-amino-2-carboxyethyl)benzoic acid
  SITE 10: note = L-lysine, useful for stapling/stapled with another amino acid residue comprising a side chain acid group to form a staple through the 6-amino group
  SITE 11: note (S)-3-amino-1-((pent-4-en-1-yloxy)carbonyl)pyrrolidine-3-ca rboxylic acid, useful for stapling/stapled with another amino acid residue comprising an olefin group to form a staple through the olefin group
  SITE 12: note = (S)-2-amino-3-(2-(trifluoromethyl)phenyl)propanoic acid
  SITE 13: note = (S)-2-amino-3-(benzo[b]thiophen-3-yl)propanoic acid
  SITE 14: note = L-glutamic acid, useful for stapling/stapled with another amino acid residue comprising a side chain amino group to form a staple through the 4-carboxyl group
  SITE 14: note = C-term amino
XDXXDXAAFKXXXE

SEQ ID NO: 55 - protein, 14 aa, synthetic construct
  SITE 1: note = N-term Acetic Acid
  SITE 1: note = (R)-2-allylpyrrolidine-2-carboxylic acid, useful for stapling/stapled with another amino acid residue comprising an olefin group to form a staple through the olefin group
  SITE 3: note = (S)-2-amino-4,4-dimethylpentanoic acid
  VARIANT 4: note = 2-amino-2-(pent-4-en-1-yl)hept-6-enoic acid, useful for stapling/stapled with another amino acid residue comprising an olefin group to form a staple through one of the two olefin groups and/or with another amino acid residue comprising an olefin group to form a staple through the other of the two olefin groups
  SITE 6: note = (S)-3-(2-amino-2-carboxyethyl)benzoic acid
  SITE 10: note = L-lysine, useful for stapling/stapled with another amino acid residue comprising a side chain acid group to form a staple through the 6-amino group
  SITE 11: note (S)-3-amino-1-((pent-4-en-1-yloxy)carbonyl)pyrrolidine-3-ca rboxylic acid, useful for stapling/stapled with another amino acid residue comprising an olefin group to form a staple through the olefin group
  SITE 12: note = (S)-2-amino-3-(2-(trifluoromethyl)phenyl)propanoic acid
  SITE 13: note = (S)-2-amino-3-(benzo[b]thiophen-3-yl)propanoic acid
  SITE 14: note = L-aspartic acid, useful for stapling/stapled with another amino acid residue comprising a side chain amino group to form a staple through the acid group in the side chain
  SITE 14: note = C-term amino
XDXXDXAAFKXXXD

SEQ ID NO: 56 - protein, 15 aa, synthetic construct
  SITE 1: note = N-term Acetic Acid
  SITE 1: note = (R)-2-allylpyrrolidine-2-carboxylic acid, useful for stapling/stapled with another amino acid residue comprising an olefin group to form a staple through the olefin group
  SITE 3: note = (S)-2-amino-4,4-dimethylpentanoic acid
  VARIANT 4: note = 2-amino-2-(pent-4-en-1-yl)hept-6-enoic acid, useful for stapling/stapled with another amino acid residue comprising an olefin group to form a staple through one of the two olefin groups and/or with another amino acid residue comprising an olefin group to form a staple through the other of the two olefin groups
  SITE 6: note = (S)-3-(2-amino-2-carboxyethyl)benzoic acid
  SITE 10: note = L-lysine, useful for stapling/stapled with another amino acid residue comprising a side chain acid group to form a staple through the 6-amino group
  SITE 11: note (S)-3-amino-1-((pent-4-en-1-yloxy)carbonyl)pyrrolidine-3-ca rboxylic acid, useful for stapling/stapled with another amino acid residue comprising an olefin group to form a staple through the olefin group
  SITE 12: note = (S)-2-amino-3-(2-(trifluoromethyl)phenyl)propanoic acid
  SITE 13: note = (S)-2-amino-3-(benzo[b]thiophen-3-yl)propanoic acid
  SITE 14: note = L-glutamic acid, useful for stapling/stapled with another amino acid residue comprising a side chain amino group to form a staple through the 4-carboxyl group
  SITE 15: note = C-term amino
XDXXDXAAFKXXXEA

SEQ ID NO: 57 - protein, 15 aa, synthetic construct
  SITE 1: note = N-term Acetic Acid
  SITE 1: note = (R)-2-allylpyrrolidine-2-carboxylic acid, useful for stapling/stapled with another amino acid residue comprising an olefin group to form a staple through the olefin group
  SITE 3: note = (S)-2-amino-4,4-dimethylpentanoic acid
  VARIANT 4: note = 2-amino-2-(pent-4-en-1-yl)hept-6-enoic acid, useful for stapling/stapled with another amino acid residue comprising an olefin group to form a staple through one of the two olefin groups and/or with another amino acid residue comprising an olefin group to form a staple through the other of the two olefin groups
  SITE 6: note = (S)-3-(2-amino-2-carboxyethyl)benzoic acid
  SITE 10: note = L-lysine, useful for stapling/stapled with another amino acid residue comprising a side chain acid group to form a staple through the 6-amino group
  SITE 11: note (S)-3-amino-1-((pent-4-en-1-yloxy)carbonyl)pyrrolidine-3-ca rboxylic acid, useful for stapling/stapled with another amino acid residue comprising an olefin group to form a staple through the olefin group
  SITE 12: note = (S)-2-amino-3-(2-(trifluoromethyl)phenyl)propanoic acid
  SITE 13: note = (S)-2-amino-3-(benzo[b]thiophen-3-yl)propanoic acid
  SITE 14: note = L-aspartic acid, useful for stapling/stapled with another amino acid residue comprising a side chain amino group to form a staple through the acid group in the side chain
  SITE 15: note = C-term amino
XDXXDXAAFKXXXDA

SEQ ID NO: 58 - protein, 15 aa, synthetic construct
  SITE 1: note = N-term Acetic Acid
  SITE 1: note = (R)-2-allylpyrrolidine-2-carboxylic acid, useful for stapling/stapled with another amino acid residue comprising an olefin group to form a staple through the olefin group
  SITE 3: note = (S)-2-amino-4,4-dimethylpentanoic acid
  VARIANT 4: note = 2-amino-2-(pent-4-en-1-yl)hept-6-enoic acid, useful for stapling/stapled with another amino acid residue comprising an olefin group to form a staple through one of the two olefin groups and/or with another amino acid residue comprising an olefin group to form a staple through the other of the two olefin groups
  SITE 6: note = (S)-3-(2-amino-2-carboxyethyl)benzoic acid
  SITE 10: note = L-lysine, useful for stapling/stapled with another amino acid residue comprising a side chain acid group to form a staple through the 6-amino group
  SITE 11: note (S)-3-amino-1-((pent-4-en-1-yloxy)carbonyl)pyrrolidine-3-ca rboxylic acid, useful for stapling/stapled with another amino acid residue comprising an olefin group to form a staple through the olefin group
  SITE 12: note = (S)-2-amino-3-(2-(trifluoromethyl)phenyl)propanoic acid
  SITE 13: note = (S)-2-amino-3-(benzo[b]thiophen-3-yl)propanoic acid
  SITE 14: note = L-glutamic acid, useful for stapling/stapled with another amino acid residue comprising a side chain amino group to form a staple through the 4-carboxyl group
  SITE 15: note = C-term amino
XDXXDXQAFKXXXEA

SEQ ID NO: 59 - protein, 15 aa, synthetic construct
  SITE 1: note = N-term Acetic Acid
  SITE 1: note = (R)-2-allylpyrrolidine-2-carboxylic acid, useful for stapling/stapled with another amino acid residue comprising an olefin group to form a staple through the olefin group
  SITE 3: note = (S)-2-amino-4,4-dimethylpentanoic acid
  VARIANT 4: note = 2-amino-2-(pent-4-en-1-yl)hept-6-enoic acid, useful for stapling/stapled with another amino acid residue comprising an olefin group to form a staple through one of the two olefin groups and/or with another amino acid residue comprising an olefin group to form a staple through the other of the two olefin groups
  SITE 6: note = (S)-3-(2-amino-2-carboxyethyl)benzoic acid
  SITE 10: note = L-lysine, useful for stapling/stapled with another amino acid residue comprising a side chain acid group to form a staple through the 6-amino group
  SITE 11: note (S)-3-amino-1-((pent-4-en-1-yloxy)carbonyl)pyrrolidine-3-ca rboxylic acid, useful for stapling/stapled with another amino acid residue comprising an olefin group to form a staple through the olefin group
  SITE 12: note = (S)-2-amino-3-(2-(trifluoromethyl)phenyl)propanoic acid
  SITE 13: note = (S)-2-amino-3-(benzo[b]thiophen-3-yl)propanoic acid
  SITE 14: note = L-aspartic acid, useful for stapling/stapled with another amino acid residue comprising a side chain amino group to form a staple through the acid group in the side chain
  SITE 15: note = C-term amino
XDXXDXQAFKXXXDA

SEQ ID NO: 60 - protein, 15 aa, synthetic construct
  SITE 1: note = N-term Acetic Acid
  SITE 1: note = (R)-2-allylpyrrolidine-2-carboxylic acid, useful for stapling/stapled with another amino acid residue comprising an olefin group to form a staple through the olefin group
  SITE 3: note = (S)-2-amino-4,4-dimethylpentanoic acid
  VARIANT 4: note = 2-amino-2-(pent-4-en-1-yl)hept-6-enoic acid, useful for stapling/stapled with another amino acid residue comprising an olefin group to form a staple through one of the two olefin groups and/or with another amino acid residue comprising an olefin group to form a staple through the other of the two olefin groups
  SITE 6: note = (S)-3-(2-amino-2-carboxyethyl)benzoic acid
  SITE 10: note = L-lysine, useful for stapling/stapled with another amino acid residue comprising a side chain acid group to form a staple through the 6-amino group
  SITE 11: note (S)-3-amino-1-((pent-4-en-1-yloxy)carbonyl)pyrrolidine-3-ca rboxylic acid, useful for stapling/stapled with another amino acid residue comprising an olefin group to form a staple through the olefin group
  SITE 12: note = (S)-2-amino-3-(thiophen-3-yl)propanoic acid
  SITE 13: note = (S)-2-amino-3-(benzo[b]thiophen-3-yl)propanoic acid
  SITE 14: note = L-glutamic acid, useful for stapling/stapled with another amino acid residue comprising a side chain amino group to form a staple through the 4-carboxyl group
  SITE 15: note = (2R,3R)-2-aminobutane-1,3-diol
  SITE 15: note = N-term (2R,3R)-2-aminobutane-1,3-diol
XDXXDXAAFKXXXEX

SEQ ID NO: 61 - protein, 15 aa, synthetic construct
  SITE 1: note = N-term Acetic Acid
  SITE 1: note = (R)-2-allylpyrrolidine-2-carboxylic acid, useful for stapling/stapled with another amino acid residue comprising an olefin group to form a staple through the olefin group
  SITE 3: note = (S)-2-amino-4,4-dimethylpentanoic acid
  VARIANT 4: note = 2-amino-2-(pent-4-en-1-yl)hept-6-enoic acid, useful for stapling/stapled with another amino acid residue comprising an olefin group to form a staple through one of the two olefin groups and/or with another amino acid residue comprising an olefin group to form a staple through the other of the two olefin groups
  SITE 6: note = (S)-3-(2-amino-2-carboxyethyl)benzoic acid
  SITE 10: note = L-lysine, useful for stapling/stapled with another amino acid residue comprising a side chain acid group to form a staple through the 6-amino group
  SITE 11: note (S)-3-amino-1-((pent-4-en-1-yloxy)carbonyl)pyrrolidine-3-ca rboxylic acid, useful for stapling/stapled with another amino acid residue comprising an olefin group to form a staple through the olefin group
  SITE 12: note = (S)-2-amino-3-(thiophen-3-yl)propanoic acid
  SITE 13: note = (S)-2-amino-3-(benzo[b]thiophen-3-yl)propanoic acid
  SITE 14: note = L-glutamic acid, useful for stapling/stapled with another amino acid residue comprising a side chain amino group to form a staple through the 4-carboxyl group
  SITE 15: note = (S)-pyrrolidin-2-ylmethanol
  SITE 15: note = C-term (S)-pyrrolidin-2-ylmethanol
XDXXDXAAFKXXXEX

SEQ ID NO: 62 - protein, 15 aa, synthetic construct
  SITE 1: note = N-term Acetic Acid
  SITE 1: note = (R)-2-allylpyrrolidine-2-carboxylic acid, useful for stapling/stapled with another amino acid residue comprising an olefin group to form a staple through the olefin group
  SITE 3: note = (S)-2-amino-4,4-dimethylpentanoic acid
  VARIANT 4: note = 2-amino-2-(pent-4-en-1-yl)hept-6-enoic acid, useful for stapling/stapled with another amino acid residue comprising an olefin group to form a staple through one of the two olefin groups and/or with another amino acid residue comprising an olefin group to form a staple through the other of the two olefin groups
  SITE 6: note = (S)-3-(2-amino-2-carboxyethyl)benzoic acid
  SITE 10: note = L-lysine, useful for stapling/stapled with another amino acid residue comprising a side chain acid group to form a staple through the 6-amino group
  SITE 11: note (S)-3-amino-1-((pent-4-en-1-yloxy)carbonyl)pyrrolidine-3-ca rboxylic acid, useful for stapling/stapled with another amino acid residue comprising an olefin group to form a staple through the olefin group
  SITE 12: note = (S)-2-amino-3-(thiophen-3-yl)propanoic acid
  SITE 13: note = (S)-2-amino-3-(benzo[b]thiophen-3-yl)propanoic acid
  SITE 14: note = L-glutamic acid, useful for stapling/stapled with another amino acid residue comprising a side chain amino group to form a staple through the 4-carboxyl group
  SITE 15: note = (S)-2-aminopropan-1-ol
  SITE 15: note = N-term (S)-2-aminopropan-1-ol
XDXXDXAAFKXXXEX

SEQ ID NO: 63 - protein, 15 aa, synthetic construct
  SITE 1: note = N-term Acetic Acid
  SITE 1: note = (R)-2-allylpyrrolidine-2-carboxylic acid, useful for stapling/stapled with another amino acid residue comprising an olefin group to form a staple through the olefin group
  SITE 3: note = (S)-2-amino-4,4-dimethylpentanoic acid
  VARIANT 4: note = 2-amino-2-(pent-4-en-1-yl)hept-6-enoic acid, useful for stapling/stapled with another amino acid residue comprising an olefin group to form a staple through one of the two olefin groups and/or with another amino acid residue comprising an olefin group to form a staple through the other of the two olefin groups
  SITE 6: note = (S)-3-(2-amino-2-carboxyethyl)benzoic acid
  SITE 7: note = 2-amino-2-methylpropanoic acid
  SITE 10: note = L-lysine, useful for stapling/stapled with another amino acid residue comprising a side chain acid group to form a staple through the 6-amino group
  SITE 11: note (S)-3-amino-1-((pent-4-en-1-yloxy)carbonyl)pyrrolidine-3-ca rboxylic acid, useful for stapling/stapled with another amino acid residue comprising an olefin group to form a staple through the olefin group
  SITE 12: note = (S)-2-amino-3-(thiophen-3-yl)propanoic acid
  SITE 13: note = (S)-2-amino-3-(benzo[b]thiophen-3-yl)propanoic acid
  SITE 14: note = L-glutamic acid, useful for stapling/stapled with another amino acid residue comprising a side chain amino group to form a staple through the 4-carboxyl group
  SITE 15: note = C-term amino
XDXXDXXAFKXXXEA

SEQ ID NO: 64 - protein, 15 aa, synthetic construct
  SITE 1: note = N-term Acetic Acid
  SITE 1: note = (R)-2-allylpyrrolidine-2-carboxylic acid, useful for stapling/stapled with another amino acid residue comprising an olefin group to form a staple through the olefin group
  SITE 3: note = (S)-2-amino-4,4-dimethylpentanoic acid
  VARIANT 4: note = 2-amino-2-(pent-4-en-1-yl)hept-6-enoic acid, useful for stapling/stapled with another amino acid residue comprising an olefin group to form a staple through one of the two olefin groups and/or with another amino acid residue comprising an olefin group to form a staple through the other of the two olefin groups
  SITE 6: note = (S)-3-(2-amino-2-carboxyethyl)benzoic acid
  SITE 7: note = 2-amino-2-methylpropanoic acid
  SITE 10: note = L-lysine, useful for stapling/stapled with another amino acid residue comprising a side chain acid group to form a staple through the 6-amino group
  SITE 11: note (S)-3-amino-1-((pent-4-en-1-yloxy)carbonyl)pyrrolidine-3-ca rboxylic acid, useful for stapling/stapled with another amino acid residue comprising an olefin group to form a staple through the olefin group
  SITE 12: note = (S)-2-amino-3-(2-(trifluoromethyl)phenyl)propanoic acid
  SITE 13: note = (S)-2-amino-3-(benzo[b]thiophen-3-yl)propanoic acid
  SITE 14: note = L-glutamic acid, useful for stapling/stapled with another amino acid residue comprising a side chain amino group to form a staple through the 4-carboxyl group
  SITE 15: note = C-term amino
XDXXDXXAFKXXXEA

SEQ ID NO: 65 - protein, 15 aa, synthetic construct
  SITE 1: note = N-term Acetic Acid
  SITE 1: note = (R)-2-allylpyrrolidine-2-carboxylic acid, useful for stapling/stapled with another amino acid residue comprising an olefin group to form a staple through the olefin group
  SITE 3: note = (S)-2-amino-4,4-dimethylpentanoic acid
  VARIANT 4: note = 2-amino-2-(pent-4-en-1-yl)hept-6-enoic acid, useful for stapling/stapled with another amino acid residue comprising an olefin group to form a staple through one of the two olefin groups and/or with another amino acid residue comprising an olefin group to form a staple through the other of the two olefin groups
  SITE 6: note = (S)-3-(2-amino-2-carboxyethyl)benzoic acid
  SITE 7: note = (S)-2-aminohexanoic acid
  SITE 10: note = L-lysine, useful for stapling/stapled with another amino acid residue comprising a side chain acid group to form a staple through the 6-amino group
  SITE 11: note (S)-3-amino-1-((pent-4-en-1-yloxy)carbonyl)pyrrolidine-3-ca rboxylic acid, useful for stapling/stapled with another amino acid residue comprising an olefin group to form a staple through the olefin group
  SITE 12: note = (S)-2-amino-3-(thiophen-3-yl)propanoic acid
  SITE 13: note = (S)-2-amino-3-(benzo[b]thiophen-3-yl)propanoic acid
  SITE 14: note = L-glutamic acid, useful for stapling/stapled with another amino acid residue comprising a side chain amino group to form a staple through the 4-carboxyl group
  SITE 15: note = C-term amino
XDXXDXXAFKXXXEA

SEQ ID NO: 66 - protein, 15 aa, synthetic construct
  SITE 1: note = N-term Acetic Acid
  SITE 1: note = (R)-2-allylpyrrolidine-2-carboxylic acid, useful for stapling/stapled with another amino acid residue comprising an olefin group to form a staple through the olefin group
  SITE 3: note = (S)-2-amino-4,4-dimethylpentanoic acid
  VARIANT 4: note = 2-amino-2-(pent-4-en-1-yl)hept-6-enoic acid, useful for stapling/stapled with another amino acid residue comprising an olefin group to form a staple through one of the two olefin groups and/or with another amino acid residue comprising an olefin group to form a staple through the other of the two olefin groups
  SITE 6: note = (S)-3-(2-amino-2-carboxyethyl)benzoic acid
  SITE 7: note = (S)-2-aminohexanoic acid
  SITE 10: note = L-lysine, useful for stapling/stapled with another amino acid residue comprising a side chain acid group to form a staple through the 6-amino group
  SITE 11: note (S)-3-amino-1-((pent-4-en-1-yloxy)carbonyl)pyrrolidine-3-ca rboxylic acid, useful for stapling/stapled with another amino acid residue comprising an olefin group to form a staple through the olefin group
  SITE 12: note = (S)-2-amino-3-(2-(trifluoromethyl)phenyl)propanoic acid
  SITE 13: note = (S)-2-amino-3-(benzo[b]thiophen-3-yl)propanoic acid
  SITE 14: note = L-glutamic acid, useful for stapling/stapled with another amino acid residue comprising a side chain amino group to form a staple through the 4-carboxyl group
  SITE 15: note = C-term amino
XDXXDXXAFKXXXEA

SEQ ID NO: 67 - protein, 15 aa, synthetic construct
  SITE 1: note = N-term Acetic Acid
  SITE 1: note = (R)-2-allylpyrrolidine-2-carboxylic acid, useful for stapling/stapled with another amino acid residue comprising an olefin group to form a staple through the olefin group
  SITE 3: note = (S)-2-amino-4,4-dimethylpentanoic acid
  VARIANT 4: note = 2-amino-2-(pent-4-en-1-yl)hept-6-enoic acid, useful for stapling/stapled with another amino acid residue comprising an olefin group to form a staple through one of the two olefin groups and/or with another amino acid residue comprising an olefin group to form a staple through the other of the two olefin groups
  SITE 6: note = (S)-3-(2-amino-2-carboxyethyl)benzoic acid
  SITE 10: note = L-lysine, useful for stapling/stapled with another amino acid residue comprising a side chain acid group to form a staple through the 6-amino group
  SITE 11: note (S)-3-amino-1-((pent-4-en-1-yloxy)carbonyl)pyrrolidine-3-ca rboxylic acid, useful for stapling/stapled with another amino acid residue comprising an olefin group to form a staple through the olefin group
  SITE 12: note = (S)-2-amino-3-(thiophen-3-yl)propanoic acid
  SITE 13: note = (S)-2-amino-3-(benzo[b]thiophen-3-yl)propanoic acid
  SITE 14: note = L-glutamic acid, useful for stapling/stapled with another amino acid residue comprising a side chain amino group to form a staple through the 4-carboxyl group
  SITE 15: note = C-term amino
XDXXDXTAFKXXXEA

SEQ ID NO: 68 - protein, 15 aa, synthetic construct
  SITE 1: note = N-term Acetic Acid
  SITE 1: note = (R)-2-allylpyrrolidine-2-carboxylic acid, useful for stapling/stapled with another amino acid residue comprising an olefin group to form a staple through the olefin group
  SITE 3: note = (S)-2-amino-4,4-dimethylpentanoic acid
  VARIANT 4: note = 2-amino-2-(pent-4-en-1-yl)hept-6-enoic acid, useful for stapling/stapled with another amino acid residue comprising an olefin group to form a staple through one of the two olefin groups and/or with another amino acid residue comprising an olefin group to form a staple through the other of the two olefin groups
  SITE 6: note = (S)-3-(2-amino-2-carboxyethyl)benzoic acid
  SITE 10: note = L-lysine, useful for stapling/stapled with another amino acid residue comprising a side chain acid group to form a staple through the 6-amino group
  SITE 11: note (S)-3-amino-1-((pent-4-en-1-yloxy)carbonyl)pyrrolidine-3-ca rboxylic acid, useful for stapling/stapled with another amino acid residue comprising an olefin group to form a staple through the olefin group
  SITE 12: note = (S)-2-amino-3-(2-(trifluoromethyl)phenyl)propanoic acid
  SITE 13: note = (S)-2-amino-3-(benzo[b]thiophen-3-yl)propanoic acid
  SITE 14: note = L-glutamic acid, useful for stapling/stapled with another amino acid residue comprising a side chain amino group to form a staple through the 4-carboxyl group
  SITE 15: note = C-term amino
XDXXDXTAFKXXXEA

SEQ ID NO: 69 - protein, 15 aa, synthetic construct
  SITE 1: note = N-term Acetic Acid
  SITE 1: note = (R)-2-allylpyrrolidine-2-carboxylic acid, useful for stapling/stapled with another amino acid residue comprising an olefin group to form a staple through the olefin group
  SITE 3: note = L-glutamic acid, useful for stapling/stapled with another amino acid residue comprising a side chain amino group to form another staple through the 4-carboxyl group
  VARIANT 4: note = 2-amino-2-(pent-4-en-1-yl)hept-6-enoic acid, useful for stapling/stapled with another amino acid residue comprising an olefin group to form a staple through one of the two olefin groups and/or with another amino acid residue comprising an olefin group to form a staple through the other of the two olefin groups
  SITE 6: note = (S)-3-(2-amino-2-carboxyethyl)benzoic acid
  SITE 7: note = L-lysine, useful for stapling/stapled with another amino acid residue comprising a side chain acid group to form another staple through the 6-amino group
  SITE 10: note = L-lysine, useful for stapling/stapled with another amino acid residue comprising a side chain acid group to form a staple through the 6-amino group
  SITE 11: note (S)-3-amino-1-((pent-4-en-1-yloxy)carbonyl)pyrrolidine-3-ca rboxylic acid, useful for stapling/stapled with another amino acid residue comprising an olefin group to form a staple through the olefin group
  SITE 12: note = (S)-2-amino-3-(thiophen-3-yl)propanoic acid
  SITE 13: note = (S)-2-amino-3-(benzo[b]thiophen-3-yl)propanoic acid
  SITE 14: note = L-glutamic acid, useful for stapling/stapled with another amino acid residue comprising a side chain amino group to form a staple through the 4-carboxyl group
  SITE 15: note = C-term amino
XDEXDXKAFKXXXEA

SEQ ID NO: 70 - protein, 15 aa, synthetic construct
  SITE 1: note = N-term Acetic Acid
  SITE 1: note = (R)-2-allylpyrrolidine-2-carboxylic acid, useful for stapling/stapled with another amino acid residue comprising an olefin group to form a staple through the olefin group
  SITE 3: note = L-glutamic acid, useful for stapling/stapled with another amino acid residue comprising a side chain amino group to form another staple through the 4-carboxyl group
  VARIANT 4: note = 2-amino-2-(pent-4-en-1-yl)hept-6-enoic acid, useful for stapling/stapled with another amino acid residue comprising an olefin group to form a staple through one of the two olefin groups and/or with another amino acid residue comprising an olefin group to form a staple through the other of the two olefin groups
  SITE 6: note = (S)-3-(2-amino-2-carboxyethyl)benzoic acid
  SITE 7: note = L-lysine, useful for stapling/stapled with another amino acid residue comprising a side chain acid group to form another staple through the 6-amino group
  SITE 10: note = L-lysine, useful for stapling/stapled with another amino acid residue comprising a side chain acid group to form a staple through the 6-amino group
  SITE 11: note (S)-3-amino-1-((pent-4-en-1-yloxy)carbonyl)pyrrolidine-3-ca rboxylic acid, useful for stapling/stapled with another amino acid residue comprising an olefin group to form a staple through the olefin group
  SITE 12: note = (S)-2-amino-3-(2-(trifluoromethyl)phenyl)propanoic acid
  SITE 13: note = (S)-2-amino-3-(benzo[b]thiophen-3-yl)propanoic acid
  SITE 14: note = L-glutamic acid, useful for stapling/stapled with another amino acid residue comprising a side chain amino group to form a staple through the 4-carboxyl group
  SITE 15: note = C-term amino
XDEXDXKAFKXXXEA

SEQ ID NO: 71 - protein, 15 aa, synthetic construct
  SITE 1: note = N-term Acetic Acid
  SITE 1: note = (R)-2-allylpyrrolidine-2-carboxylic acid, useful for stapling/stapled with another amino acid residue comprising an olefin group to form a staple through the olefin group
  SITE 3: note = (S)-2-amino-4,4-dimethylpentanoic acid
  VARIANT 4: note = 2-amino-2-(pent-4-en-1-yl)hept-6-enoic acid, useful for stapling/stapled with another amino acid residue comprising an olefin group to form a staple through one of the two olefin groups and/or with another amino acid residue comprising an olefin group to form a staple through the other of the two olefin groups
  SITE 6: note = (S)-3-(2-amino-2-carboxyethyl)benzoic acid
  SITE 10: note = L-lysine, useful for stapling/stapled with another amino acid residue comprising a side chain acid group to form a staple through the 6-amino group
  SITE 11: note (S)-3-amino-1-((pent-4-en-1-yloxy)carbonyl)pyrrolidine-3-ca rboxylic acid, useful for stapling/stapled with another amino acid residue comprising an olefin group to form a staple through the olefin group
  SITE 12: note = (S)-2-amino-3-(thiophen-3-yl)propanoic acid
  SITE 13: note = (S)-2-amino-3-(benzo[b]thiophen-3-yl)propanoic acid
  SITE 14: note = L-glutamic acid, useful for stapling/stapled with another amino acid residue comprising a side chain amino group to form a staple through the 4-carboxyl group
  SITE 15: note = C-term amino
XNXXDXAAFKXXXEA

SEQ ID NO: 72 - protein, 15 aa, synthetic construct
  SITE 1: note = N-term Acetic Acid
  SITE 1: note = (R)-2-allylpyrrolidine-2-carboxylic acid, useful for stapling/stapled with another amino acid residue comprising an olefin group to form a staple through the olefin group
  SITE 2: note = L-homoserine
  SITE 3: note = (S)-2-amino-4,4-dimethylpentanoic acid
  VARIANT 4: note = 2-amino-2-(pent-4-en-1-yl)hept-6-enoic acid, useful for stapling/stapled with another amino acid residue comprising an olefin group to form a staple through one of the two olefin groups and/or with another amino acid residue comprising an olefin group to form a staple through the other of the two olefin groups
  SITE 6: note = (S)-3-(2-amino-2-carboxyethyl)benzoic acid
  SITE 10: note = L-lysine, useful for stapling/stapled with another amino acid residue comprising a side chain acid group to form a staple through the 6-amino group
  SITE 11: note (S)-3-amino-1-((pent-4-en-1-yloxy)carbonyl)pyrrolidine-3-ca rboxylic acid, useful for stapling/stapled with another amino acid residue comprising an olefin group to form a staple through the olefin group
  SITE 12: note = (S)-2-amino-3-(thiophen-3-yl)propanoic acid
  SITE 13: note = (S)-2-amino-3-(benzo[b]thiophen-3-yl)propanoic acid
  SITE 14: note = L-glutamic acid, useful for stapling/stapled with another amino acid residue comprising a side chain amino group to form a staple through the 4-carboxyl group
  SITE 15: note = C-term amino
XSXXDXAAFKXXXEA

SEQ ID NO: 73 - protein, 15 aa, synthetic construct
  SITE 1: note = N-term Acetic Acid
  SITE 1: note = (R)-2-allylpyrrolidine-2-carboxylic acid, useful for stapling/stapled with another amino acid residue comprising an olefin group to form a staple through the olefin group
  SITE 3: note = (S)-2-amino-4,4-dimethylpentanoic acid
  VARIANT 4: note = 2-amino-2-(pent-4-en-1-yl)hept-6-enoic acid, useful for stapling/stapled with another amino acid residue comprising an olefin group to form a staple through one of the two olefin groups and/or with another amino acid residue comprising an olefin group to form a staple through the other of the two olefin groups
  SITE 6: note = (S)-3-(2-amino-2-carboxyethyl)benzoic acid
  SITE 10: note = L-lysine, useful for stapling/stapled with another amino acid residue comprising a side chain acid group to form a staple through the 6-amino group
  SITE 11: note (S)-3-amino-1-((pent-4-en-1-yloxy)carbonyl)pyrrolidine-3-ca rboxylic acid, useful for stapling/stapled with another amino acid residue comprising an olefin group to form a staple through the olefin group
  SITE 12: note = (S)-2-amino-3-(thiophen-3-yl)propanoic acid
  SITE 13: note = (S)-2-amino-3-(benzo[b]thiophen-3-yl)propanoic acid
  SITE 14: note = L-glutamic acid, useful for stapling/stapled with another amino acid residue comprising a side chain amino group to form a staple through the 4-carboxyl group
  SITE 15: note = C-term amino
XDXXNXAAFKXXXEA

SEQ ID NO: 74 - protein, 15 aa, synthetic construct
  SITE 1: note = N-term Acetic Acid
  SITE 1: note = (R)-2-allylpyrrolidine-2-carboxylic acid, useful for stapling/stapled with another amino acid residue comprising an olefin group to form a staple through the olefin group
  SITE 3: note = (S)-2-amino-4,4-dimethylpentanoic acid
  VARIANT 4: note = 2-amino-2-(pent-4-en-1-yl)hept-6-enoic acid, useful for stapling/stapled with another amino acid residue comprising an olefin group to form a staple through one of the two olefin groups and/or with another amino acid residue comprising an olefin group to form a staple through the other of the two olefin groups
  SITE 5: note = L-homoserine
  SITE 6: note = (S)-3-(2-amino-2-carboxyethyl)benzoic acid
  SITE 10: note = L-lysine, useful for stapling/stapled with another amino acid residue comprising a side chain acid group to form a staple through the 6-amino group
  SITE 11: note (S)-3-amino-1-((pent-4-en-1-yloxy)carbonyl)pyrrolidine-3-ca rboxylic acid, useful for stapling/stapled with another amino acid residue comprising an olefin group to form a staple through the olefin group
  SITE 12: note = (S)-2-amino-3-(thiophen-3-yl)propanoic acid
  SITE 13: note = (S)-2-amino-3-(benzo[b]thiophen-3-yl)propanoic acid
  SITE 14: note = L-glutamic acid, useful for stapling/stapled with another amino acid residue comprising a side chain amino group to form a staple through the 4-carboxyl group
  SITE 15: note = C-term amino
XDXXSXAAFKXXXEA

SEQ ID NO: 75 - protein, 15 aa, synthetic construct
  SITE 1: note = N-term Acetic Acid
  SITE 1: note = (R)-2-allylpyrrolidine-2-carboxylic acid, useful for stapling/stapled with another amino acid residue comprising an olefin group to form a staple through the olefin group
  SITE 3: note = (S)-2-amino-4,4-dimethylpentanoic acid
  VARIANT 4: note = 2-amino-2-(pent-4-en-1-yl)hept-6-enoic acid, useful for stapling/stapled with another amino acid residue comprising an olefin group to form a staple through one of the two olefin groups and/or with another amino acid residue comprising an olefin group to form a staple through the other of the two olefin groups
  SITE 6: note = (S)-3-(2-amino-2-carboxyethyl)benzoic acid
  SITE 10: note = L-lysine, useful for stapling/stapled with another amino acid residue comprising a side chain acid group to form a staple through the 6-amino group
  SITE 11: note (S)-3-amino-1-((pent-4-en-1-yloxy)carbonyl)pyrrolidine-3-ca rboxylic acid, useful for stapling/stapled with another amino acid residue comprising an olefin group to form a staple through the olefin group
  SITE 12: note = (S)-2-amino-3-(thiophen-3-yl)propanoic acid
  SITE 13: note = (S)-2-amino-3-(benzo[b]thiophen-3-yl)propanoic acid
  SITE 14: note = L-glutamic acid, useful for stapling/stapled with another amino acid residue comprising a side chain amino group to form a staple through the 4-carboxyl group
  SITE 15: note = C-term amino
XNXXDXSAFKXXXEA

SEQ ID NO: 76 - protein, 15 aa, synthetic construct
  SITE 1: note = N-term Acetic Acid
  SITE 1: note = (R)-2-allylpyrrolidine-2-carboxylic acid, useful for stapling/stapled with another amino acid residue comprising an olefin group to form a staple through the olefin group
  SITE 2: note = L-homoserine
  SITE 3: note = (S)-2-amino-4,4-dimethylpentanoic acid
  VARIANT 4: note = 2-amino-2-(pent-4-en-1-yl)hept-6-enoic acid, useful for stapling/stapled with another amino acid residue comprising an olefin group to form a staple through one of the two olefin groups and/or with another amino acid residue comprising an olefin group to form a staple through the other of the two olefin groups
  SITE 6: note = (S)-3-(2-amino-2-carboxyethyl)benzoic acid
  SITE 10: note = L-lysine, useful for stapling/stapled with another amino acid residue comprising a side chain acid group to form a staple through the 6-amino group
  SITE 11: note (S)-3-amino-1-((pent-4-en-1-yloxy)carbonyl)pyrrolidine-3-ca rboxylic acid, useful for stapling/stapled with another amino acid residue comprising an olefin group to form a staple through the olefin group
  SITE 12: note = (S)-2-amino-3-(thiophen-3-yl)propanoic acid
  SITE 13: note = (S)-2-amino-3-(benzo[b]thiophen-3-yl)propanoic acid
  SITE 14: note = L-glutamic acid, useful for stapling/stapled with another amino acid residue comprising a side chain amino group to form a staple through the 4-carboxyl group
  SITE 15: note = C-term amino
XSXXDXSAFKXXXEA

SEQ ID NO: 77 - protein, 15 aa, synthetic construct
  SITE 1: note = N-term Acetic Acid
  SITE 1: note = (R)-2-allylpyrrolidine-2-carboxylic acid, useful for stapling/stapled with another amino acid residue comprising an olefin group to form a staple through the olefin group
  SITE 3: note = (S)-2-amino-4,4-dimethylpentanoic acid
  VARIANT 4: note = 2-amino-2-(pent-4-en-1-yl)hept-6-enoic acid, useful for stapling/stapled with another amino acid residue comprising an olefin group to form a staple through one of the two olefin groups and/or with another amino acid residue comprising an olefin group to form a staple through the other of the two olefin groups
  SITE 6: note = (S)-3-(2-amino-2-carboxyethyl)benzoic acid
  SITE 10: note = L-lysine, useful for stapling/stapled with another amino acid residue comprising a side chain acid group to form a staple through the 6-amino group
  SITE 11: note (S)-3-amino-1-((pent-4-en-1-yloxy)carbonyl)pyrrolidine-3-ca rboxylic acid, useful for stapling/stapled with another amino acid residue comprising an olefin group to form a staple through the olefin group
  SITE 12: note = (S)-2-amino-3-(thiophen-3-yl)propanoic acid
  SITE 13: note = (S)-2-amino-3-(benzo[b]thiophen-3-yl)propanoic acid
  SITE 14: note = L-glutamic acid, useful for stapling/stapled with another amino acid residue comprising a side chain amino group to form a staple through the 4-carboxyl group
  SITE 15: note = C-term amino
XDXXNXSAFKXXXEA

SEQ ID NO: 78 - protein, 15 aa, synthetic construct
  SITE 1: note = N-term Acetic Acid
  SITE 1: note = (R)-2-allylpyrrolidine-2-carboxylic acid, useful for stapling/stapled with another amino acid residue comprising an olefin group to form a staple through the olefin group
  SITE 3: note = (S)-2-amino-4,4-dimethylpentanoic acid
  VARIANT 4: note = 2-amino-2-(pent-4-en-1-yl)hept-6-enoic acid, useful for stapling/stapled with another amino acid residue comprising an olefin group to form a staple through one of the two olefin groups and/or with another amino acid residue comprising an olefin group to form a staple through the other of the two olefin groups
  SITE 5: note = L-homoserine
  SITE 6: note = (S)-3-(2-amino-2-carboxyethyl)benzoic acid
  SITE 10: note = L-lysine, useful for stapling/stapled with another amino acid residue comprising a side chain acid group to form a staple through the 6-amino group
  SITE 11: note (S)-3-amino-1-((pent-4-en-1-yloxy)carbonyl)pyrrolidine-3-ca rboxylic acid, useful for stapling/stapled with another amino acid residue comprising an olefin group to form a staple through the olefin group
  SITE 12: note = (S)-2-amino-3-(thiophen-3-yl)propanoic acid
  SITE 13: note = (S)-2-amino-3-(benzo[b]thiophen-3-yl)propanoic acid
  SITE 14: note = L-glutamic acid, useful for stapling/stapled with another amino acid residue comprising a side chain amino group to form a staple through the 4-carboxyl group
  SITE 15: note = C-term amino
XDXXSXSAFKXXXEA

SEQ ID NO: 79 - protein, 15 aa, synthetic construct
  SITE 1: note = N-term Acetic Acid
  SITE 1: note = (R)-2-allylpyrrolidine-2-carboxylic acid, useful for stapling/stapled with another amino acid residue comprising an olefin group to form a staple through the olefin group
  SITE 3: note = (S)-2-amino-4,4-dimethylpentanoic acid
  VARIANT 4: note = 2-amino-2-(pent-4-en-1-yl)hept-6-enoic acid, useful for stapling/stapled with another amino acid residue comprising an olefin group to form a staple through one of the two olefin groups and/or with another amino acid residue comprising an olefin group to form a staple through the other of the two olefin groups
  SITE 6: note = (S)-3-(2-amino-2-carboxyethyl)benzoic acid
  SITE 10: note = L-lysine, useful for stapling/stapled with another amino acid residue comprising a side chain acid group to form a staple through the 6-amino group
  SITE 11: note (S)-3-amino-1-((pent-4-en-1-yloxy)carbonyl)pyrrolidine-3-ca rboxylic acid, useful for stapling/stapled with another amino acid residue comprising an olefin group to form a staple through the olefin group
  SITE 12: note = (S)-2-amino-3-(thiophen-3-yl)propanoic acid
  SITE 13: note = (S)-2-amino-3-(benzo[b]thiophen-3-yl)propanoic acid
  SITE 14: note = L-glutamic acid, useful for stapling/stapled with another amino acid residue comprising a side chain amino group to form a staple through the 4-carboxyl group
  SITE 15: note = C-term amino
XNXXDXQAFKXXXEA

SEQ ID NO: 80 - protein, 15 aa, synthetic construct
  SITE 1: note = N-term Acetic Acid
  SITE 1: note = (R)-2-allylpyrrolidine-2-carboxylic acid, useful for stapling/stapled with another amino acid residue comprising an olefin group to form a staple through the olefin group
  SITE 2: note = L-homoserine
  SITE 3: note = (S)-2-amino-4,4-dimethylpentanoic acid
  VARIANT 4: note = 2-amino-2-(pent-4-en-1-yl)hept-6-enoic acid, useful for stapling/stapled with another amino acid residue comprising an olefin group to form a staple through one of the two olefin groups and/or with another amino acid residue comprising an olefin group to form a staple through the other of the two olefin groups
  SITE 6: note = (S)-3-(2-amino-2-carboxyethyl)benzoic acid
  SITE 10: note = L-lysine, useful for stapling/stapled with another amino acid residue comprising a side chain acid group to form a staple through the 6-amino group
  SITE 11: note (S)-3-amino-1-((pent-4-en-1-yloxy)carbonyl)pyrrolidine-3-ca rboxylic acid, useful for stapling/stapled with another amino acid residue comprising an olefin group to form a staple through the olefin group
  SITE 12: note = (S)-2-amino-3-(thiophen-3-yl)propanoic acid
  SITE 13: note = (S)-2-amino-3-(benzo[b]thiophen-3-yl)propanoic acid
  SITE 14: note = L-glutamic acid, useful for stapling/stapled with another amino acid residue comprising a side chain amino group to form a staple through the 4-carboxyl group
  SITE 15: note = C-term amino
XSXXDXQAFKXXXEA

SEQ ID NO: 81 - protein, 15 aa, synthetic construct
  SITE 1: note = N-term Acetic Acid
  SITE 1: note = (R)-2-allylpyrrolidine-2-carboxylic acid, useful for stapling/stapled with another amino acid residue comprising an olefin group to form a staple through the olefin group
  SITE 3: note = (S)-2-amino-4,4-dimethylpentanoic acid
  VARIANT 4: note = 2-amino-2-(pent-4-en-1-yl)hept-6-enoic acid, useful for stapling/stapled with another amino acid residue comprising an olefin group to form a staple through one of the two olefin groups and/or with another amino acid residue comprising an olefin group to form a staple through the other of the two olefin groups
  SITE 6: note = (S)-3-(2-amino-2-carboxyethyl)benzoic acid
  SITE 10: note = L-lysine, useful for stapling/stapled with another amino acid residue comprising a side chain acid group to form a staple through the 6-amino group
  SITE 11: note (S)-3-amino-1-((pent-4-en-1-yloxy)carbonyl)pyrrolidine-3-ca rboxylic acid, useful for stapling/stapled with another amino acid residue comprising an olefin group to form a staple through the olefin group
  SITE 12: note = (S)-2-amino-3-(thiophen-3-yl)propanoic acid
  SITE 13: note = (S)-2-amino-3-(benzo[b]thiophen-3-yl)propanoic acid
  SITE 14: note = L-glutamic acid, useful for stapling/stapled with another amino acid residue comprising a side chain amino group to form a staple through the 4-carboxyl group
  SITE 15: note = C-term amino
XDXXNXQAFKXXXEA

SEQ ID NO: 82 - protein, 15 aa, synthetic construct
  SITE 1: note = N-term Acetic Acid
  SITE 1: note = (R)-2-allylpyrrolidine-2-carboxylic acid, useful for stapling/stapled with another amino acid residue comprising an olefin group to form a staple through the olefin group
  SITE 3: note = (S)-2-amino-4,4-dimethylpentanoic acid
  VARIANT 4: note = 2-amino-2-(pent-4-en-1-yl)hept-6-enoic acid, useful for stapling/stapled with another amino acid residue comprising an olefin group to form a staple through one of the two olefin groups and/or with another amino acid residue comprising an olefin group to form a staple through the other of the two olefin groups
  SITE 5: note = L-homoserine
  SITE 6: note = (S)-3-(2-amino-2-carboxyethyl)benzoic acid
  SITE 10: note = L-lysine, useful for stapling/stapled with another amino acid residue comprising a side chain acid group to form a staple through the 6-amino group
  SITE 11: note (S)-3-amino-1-((pent-4-en-1-yloxy)carbonyl)pyrrolidine-3-ca rboxylic acid, useful for stapling/stapled with another amino acid residue comprising an olefin group to form a staple through the olefin group
  SITE 12: note = (S)-2-amino-3-(thiophen-3-yl)propanoic acid
  SITE 13: note = (S)-2-amino-3-(benzo[b]thiophen-3-yl)propanoic acid
  SITE 14: note = L-glutamic acid, useful for stapling/stapled with another amino acid residue comprising a side chain amino group to form a staple through the 4-carboxyl group
  SITE 15: note = C-term amino
XDXXSXQAFKXXXEA

SEQ ID NO: 83 - protein, 15 aa, synthetic construct
  SITE 1: note = N-term Acetic Acid
  SITE 1: note = (R)-2-allylpyrrolidine-2-carboxylic acid, useful for stapling/stapled with another amino acid residue comprising an olefin group to form a staple through the olefin group
  SITE 3: note = (S)-2-amino-4,4-dimethylpentanoic acid
  VARIANT 4: note = 2-amino-2-(pent-4-en-1-yl)hept-6-enoic acid, useful for stapling/stapled with another amino acid residue comprising an olefin group to form a staple through one of the two olefin groups and/or with another amino acid residue comprising an olefin group to form a staple through the other of the two olefin groups
  SITE 6: note = (S)-3-(2-amino-2-carboxyethyl)benzoic acid
  SITE 7: note = L-glutamic acid, useful for stapling/stapled with another amino acid residue comprising a side chain amino group to form a staple through the acid group in the side chain
  SITE 11: note (S)-3-amino-1-((pent-4-en-1-yloxy)carbonyl)pyrrolidine-3-ca rboxylic acid, useful for stapling/stapled with another amino acid residue comprising an olefin group to form a staple through the olefin group
  SITE 12: note = (S)-2-amino-3-(2-(trifluoromethyl)phenyl)propanoic acid
  SITE 13: note = (S)-2-amino-3-(benzo[b]thiophen-3-yl)propanoic acid
  SITE 14: note = N5-(4-aminobutyl)-L-glutamine, useful for stapling/stapled with another amino acid residue comprising a side chain acid group to form a staple through the amino group in the side chain
  SITE 15: note = C-term amino
XDXXDXEAFLXXXQA

SEQ ID NO: 84 - protein, 15 aa, synthetic construct
  SITE 1: note = N-term Acetic Acid
  SITE 1: note = (R)-2-allylpyrrolidine-2-carboxylic acid, useful for stapling/stapled with another amino acid residue comprising an olefin group to form a staple through the olefin group
  SITE 3: note = (S)-2-amino-4,4-dimethylpentanoic acid
  VARIANT 4: note = 2-amino-2-(pent-4-en-1-yl)hept-6-enoic acid, useful for stapling/stapled with another amino acid residue comprising an olefin group to form a staple through one of the two olefin groups and/or with another amino acid residue comprising an olefin group to form a staple through the other of the two olefin groups
  SITE 6: note = (S)-3-(2-amino-2-carboxyethyl)benzoic acid
  SITE 7: note = L-glutamic acid, useful for stapling/stapled with another amino acid residue comprising a side chain amino group to form a staple through the acid group in the side chain
  SITE 11: note (S)-3-amino-1-((pent-4-en-1-yloxy)carbonyl)pyrrolidine-3-ca rboxylic acid, useful for stapling/stapled with another amino acid residue comprising an olefin group to form a staple through the olefin group
  SITE 12: note = (S)-2-amino-3-(2-(trifluoromethyl)phenyl)propanoic acid
  SITE 13: note = (S)-2-amino-3-(benzo[b]thiophen-3-yl)propanoic acid
  SITE 14: note = (S)-2-amino-5-(4-aminopiperidin-1-yl)-5-oxopentanoic acid, useful for stapling/stapled with another amino acid residue comprising a side chain acid group to form a staple through the amino group in the side chain
  SITE 15: note = C-term amino
XDXXDXEAFLXXXXA

SEQ ID NO: 85 - protein, 15 aa, synthetic construct
  SITE 1: note = N-term Acetic Acid
  SITE 1: note = (R)-2-allylpyrrolidine-2-carboxylic acid, useful for stapling/stapled with another amino acid residue comprising an olefin group to form a staple through the olefin group
  SITE 3: note = (S)-2-amino-4,4-dimethylpentanoic acid
  VARIANT 4: note = 2-amino-2-(pent-4-en-1-yl)hept-6-enoic acid, useful for stapling/stapled with another amino acid residue comprising an olefin group to form a staple through one of the two olefin groups and/or with another amino acid residue comprising an olefin group to form a staple through the other of the two olefin groups
  SITE 6: note = (S)-3-(2-amino-2-carboxyethyl)benzoic acid
  SITE 7: note = (S)-2-amino-5-(4-aminopiperidin-1-yl)-5-oxopentanoic acid, useful for stapling/stapled with another amino acid residue comprising a side chain acid group to form a staple through the amino group in the side chain
  SITE 11: note (S)-3-amino-1-((pent-4-en-1-yloxy)carbonyl)pyrrolidine-3-ca rboxylic acid, useful for stapling/stapled with another amino acid residue comprising an olefin group to form a staple through the olefin group
  SITE 12: note = (S)-2-amino-3-(2-(trifluoromethyl)phenyl)propanoic acid
  SITE 13: note = (S)-2-amino-3-(benzo[b]thiophen-3-yl)propanoic acid
  SITE 14: note = L-glutamic acid, useful for stapling/stapled with another amino acid residue comprising a side chain amino group to form a staple through the acid group in the side chain
  SITE 15: note = C-term amino
XDXXDXXAFLXXXEA

SEQ ID NO: 86 - protein, 15 aa, synthetic construct
  SITE 1: note = N-term Acetic Acid
  SITE 1: note = (R)-2-allylpyrrolidine-2-carboxylic acid, useful for stapling/stapled with another amino acid residue comprising an olefin group to form a staple through the olefin group
  SITE 3: note = (S)-2-amino-4,4-dimethylpentanoic acid
  VARIANT 4: note = 2-amino-2-(pent-4-en-1-yl)hept-6-enoic acid, useful for stapling/stapled with another amino acid residue comprising an olefin group to form a staple through one of the two olefin groups and/or with another amino acid residue comprising an olefin group to form a staple through the other of the two olefin groups
  SITE 6: note = (S)-3-(2-amino-2-carboxyethyl)benzoic acid
  SITE 7: note = L-glutamic acid, useful for stapling/stapled with another amino acid residue comprising a side chain amino group to form a staple through the acid group in the side chain
  SITE 11: note (S)-3-amino-1-((pent-4-en-1-yloxy)carbonyl)pyrrolidine-3-ca rboxylic acid, useful for stapling/stapled with another amino acid residue comprising an olefin group to form a staple through the olefin group
  SITE 12: note = (S)-2-amino-3-(2-(trifluoromethyl)phenyl)propanoic acid
  SITE 13: note = (S)-2-amino-3-(benzo[b]thiophen-3-yl)propanoic acid
  SITE 14: note = N5-methyl-N5-(piperidin-4-ylmethyl)-L-glutamine, useful for stapling/stapled with another amino acid residue comprising a side chain acid group to form a staple through the amino group in the side chain
  SITE 15: note = C-term amino
XDXXDXEAFLXXXQA

SEQ ID NO: 87 - protein, 15 aa, synthetic construct
  SITE 1: note = N-term Acetic Acid
  SITE 1: note = (R)-2-allylpyrrolidine-2-carboxylic acid, useful for stapling/stapled with another amino acid residue comprising an olefin group to form a staple through the olefin group
  SITE 3: note = (S)-2-amino-3-cyclohexylpropanoic acid
  VARIANT 4: note = 2-amino-2-(pent-4-en-1-yl)hept-6-enoic acid, useful for stapling/stapled with another amino acid residue comprising an olefin group to form a staple through one of the two olefin groups and/or with another amino acid residue comprising an olefin group to form a staple through the other of the two olefin groups
  SITE 6: note = (S)-3-(2-amino-2-carboxyethyl)benzoic acid
  SITE 10: note = L-lysine, useful for stapling/stapled with another amino acid residue comprising a side chain acid group to form a staple through the 6-amino group
  SITE 11: note (S)-3-amino-1-((pent-4-en-1-yloxy)carbonyl)pyrrolidine-3-ca rboxylic acid, useful for stapling/stapled with another amino acid residue comprising an olefin group to form a staple through the olefin group
  SITE 12: note = (S)-2-amino-3-(2-(trifluoromethyl)phenyl)propanoic acid
  SITE 13: note = (S)-2-amino-3-(benzo[b]thiophen-3-yl)propanoic acid
  SITE 14: note = L-glutamic acid, useful for stapling/stapled with another amino acid residue comprising a side chain amino group to form a staple through the 4-carboxyl group
  SITE 15: note = C-term amino
XDXXDXAAFKXXXEA

SEQ ID NO: 88 - protein, 15 aa, synthetic construct
  SITE 1: note = N-term Acetic Acid
  SITE 1: note = (R)-2-allylpyrrolidine-2-carboxylic acid, useful for stapling/stapled with another amino acid residue comprising an olefin group to form a staple through the olefin group
  SITE 3: note = (S)-2-amino-4,4-dimethylpentanoic acid
  VARIANT 4: note = 2-amino-2-(pent-4-en-1-yl)hept-6-enoic acid, useful for stapling/stapled with another amino acid residue comprising an olefin group to form a staple through one of the two olefin groups and/or with another amino acid residue comprising an olefin group to form a staple through the other of the two olefin groups
  SITE 6: note = (S)-3-(2-amino-2-carboxyethyl)benzoic acid
  SITE 7: note = (S)-2-amino-4,4-dimethylpentanoic acid
  SITE 10: note = L-lysine, useful for stapling/stapled with another amino acid residue comprising a side chain acid group to form a staple through the 6-amino group
  SITE 11: note (S)-3-amino-1-((pent-4-en-1-yloxy)carbonyl)pyrrolidine-3-ca rboxylic acid, useful for stapling/stapled with another amino acid residue comprising an olefin group to form a staple through the olefin group
  SITE 12: note = (S)-2-amino-3-(2-(trifluoromethyl)phenyl)propanoic acid
  SITE 13: note = (S)-2-amino-3-(benzo[b]thiophen-3-yl)propanoic acid
  SITE 14: note = L-glutamic acid, useful for stapling/stapled with another amino acid residue comprising a side chain amino group to form a staple through the 4-carboxyl group
  SITE 15: note = C-term amino
XDXXDXXAFKXXXEA

SEQ ID NO: 89 - protein, 15 aa, synthetic construct
  SITE 1: note = N-term Acetic Acid
  SITE 1: note = (R)-2-allylpyrrolidine-2-carboxylic acid, useful for stapling/stapled with another amino acid residue comprising an olefin group to form a staple through the olefin group
  SITE 3: note = (S)-2-amino-4,4-dimethylpentanoic acid
  VARIANT 4: note = 2-amino-2-(pent-4-en-1-yl)hept-6-enoic acid, useful for stapling/stapled with another amino acid residue comprising an olefin group to form a staple through one of the two olefin groups and/or with another amino acid residue comprising an olefin group to form a staple through the other of the two olefin groups
  SITE 6: note = (S)-3-(2-amino-2-carboxyethyl)benzoic acid
  SITE 7: note = (S)-2-amino-3-cyclohexylpropanoic acid
  SITE 10: note = L-lysine, useful for stapling/stapled with another amino acid residue comprising a side chain acid group to form a staple through the 6-amino group
  SITE 11: note (S)-3-amino-1-((pent-4-en-1-yloxy)carbonyl)pyrrolidine-3-ca rboxylic acid, useful for stapling/stapled with another amino acid residue comprising an olefin group to form a staple through the olefin group
  SITE 12: note = (S)-2-amino-3-(2-(trifluoromethyl)phenyl)propanoic acid
  SITE 13: note = (S)-2-amino-3-(benzo[b]thiophen-3-yl)propanoic acid
  SITE 14: note = L-glutamic acid, useful for stapling/stapled with another amino acid residue comprising a side chain amino group to form a staple through the 4-carboxyl group
  SITE 15: note = C-term amino
XDXXDXXAFKXXXEA

SEQ ID NO: 90 - protein, 15 aa, synthetic construct
  SITE 1: note = N-term Acetic Acid
  SITE 1: note = (R)-2-allylpyrrolidine-2-carboxylic acid, useful for stapling/stapled with another amino acid residue comprising an olefin group to form a staple through the olefin group
  SITE 3: note = (S)-2-amino-3-cyclohexylpropanoic acid
  VARIANT 4: note = 2-amino-2-(pent-4-en-1-yl)hept-6-enoic acid, useful for stapling/stapled with another amino acid residue comprising an olefin group to form a staple through one of the two olefin groups and/or with another amino acid residue comprising an olefin group to form a staple through the other of the two olefin groups
  SITE 6: note = (S)-3-(2-amino-2-carboxyethyl)benzoic acid
  SITE 7: note = (S)-2-amino-3-cyclohexylpropanoic acid
  SITE 10: note = L-lysine, useful for stapling/stapled with another amino acid residue comprising a side chain acid group to form a staple through the 6-amino group
  SITE 11: note (S)-3-amino-1-((pent-4-en-1-yloxy)carbonyl)pyrrolidine-3-ca rboxylic acid, useful for stapling/stapled with another amino acid residue comprising an olefin group to form a staple through the olefin group
  SITE 12: note = (S)-2-amino-3-(2-(trifluoromethyl)phenyl)propanoic acid
  SITE 13: note = (S)-2-amino-3-(benzo[b]thiophen-3-yl)propanoic acid
  SITE 14: note = L-glutamic acid, useful for stapling/stapled with another amino acid residue comprising a side chain amino group to form a staple through the 4-carboxyl group
  SITE 15: note = C-term amino
XDXXDXXAFKXXXEA

SEQ ID NO: 91 - protein, 15 aa, synthetic construct
  SITE 1: note = N-term Acetic Acid
  SITE 1: note = (R)-2-allylpyrrolidine-2-carboxylic acid, useful for stapling/stapled with another amino acid residue comprising an olefin group to form a staple through the olefin group
  SITE 3: note = (S)-2-amino-4,4-dimethylpentanoic acid
  VARIANT 4: note = 2-amino-2-(pent-4-en-1-yl)hept-6-enoic acid, useful for stapling/stapled with another amino acid residue comprising an olefin group to form a staple through one of the two olefin groups and/or with another amino acid residue comprising an olefin group to form a staple through the other of the two olefin groups
  SITE 6: note = (S)-3-(2-amino-2-carboxyethyl)benzoic acid
  SITE 10: note = L-lysine, useful for stapling/stapled with another amino acid residue comprising a side chain acid group to form a staple through the 6-amino group
  SITE 11: note (S)-3-amino-1-((pent-4-en-1-yloxy)carbonyl)pyrrolidine-3-ca rboxylic acid, useful for stapling/stapled with another amino acid residue comprising an olefin group to form a staple through the olefin group
  SITE 12: note = (S)-2-amino-3-(2-(trifluoromethyl)phenyl)propanoic acid
  SITE 13: note = (S)-2-amino-3-(benzo[b]thiophen-3-yl)propanoic acid
  SITE 14: note = L-glutamic acid, useful for stapling/stapled with another amino acid residue comprising a side chain amino group to form a staple through the 4-carboxyl group
  SITE 15: note = C-term amino
XDXXDXAAFKXXXEL

SEQ ID NO: 92 - protein, 15 aa, synthetic construct
  SITE 1: note = N-term Acetic Acid
  SITE 1: note = (R)-2-allylpyrrolidine-2-carboxylic acid, useful for stapling/stapled with another amino acid residue comprising an olefin group to form a staple through the olefin group
  SITE 3: note = (S)-2-amino-3-cyclohexylpropanoic acid
  VARIANT 4: note = 2-amino-2-(pent-4-en-1-yl)hept-6-enoic acid, useful for stapling/stapled with another amino acid residue comprising an olefin group to form a staple through one of the two olefin groups and/or with another amino acid residue comprising an olefin group to form a staple through the other of the two olefin groups
  SITE 6: note = (S)-3-(2-amino-2-carboxyethyl)benzoic acid
  SITE 10: note = L-lysine, useful for stapling/stapled with another amino acid residue comprising a side chain acid group to form a staple through the 6-amino group
  SITE 11: note (S)-3-amino-1-((pent-4-en-1-yloxy)carbonyl)pyrrolidine-3-ca rboxylic acid, useful for stapling/stapled with another amino acid residue comprising an olefin group to form a staple through the olefin group
  SITE 12: note = (S)-2-amino-3-(2-(trifluoromethyl)phenyl)propanoic acid
  SITE 13: note = (S)-2-amino-3-(benzo[b]thiophen-3-yl)propanoic acid
  SITE 14: note = L-glutamic acid, useful for stapling/stapled with another amino acid residue comprising a side chain amino group to form a staple through the 4-carboxyl group
  SITE 15: note = C-term amino
XDXXDXAAFKXXXEL

SEQ ID NO: 93 - protein, 15 aa, synthetic construct
  SITE 1: note = N-term Acetic Acid
  SITE 1: note = (R)-2-allylpyrrolidine-2-carboxylic acid, useful for stapling/stapled with another amino acid residue comprising an olefin group to form a staple through the olefin group
  SITE 3: note = (S)-2-amino-4,4-dimethylpentanoic acid
  VARIANT 4: note = 2-amino-2-(pent-4-en-1-yl)hept-6-enoic acid, useful for stapling/stapled with another amino acid residue comprising an olefin group to form a staple through one of the two olefin groups and/or with another amino acid residue comprising an olefin group to form a staple through the other of the two olefin groups
  SITE 6: note = (S)-3-(2-amino-2-carboxyethyl)benzoic acid
  SITE 7: note = (S)-2-amino-4,4-dimethylpentanoic acid
  SITE 10: note = L-lysine, useful for stapling/stapled with another amino acid residue comprising a side chain acid group to form a staple through the 6-amino group
  SITE 11: note (S)-3-amino-1-((pent-4-en-1-yloxy)carbonyl)pyrrolidine-3-ca rboxylic acid, useful for stapling/stapled with another amino acid residue comprising an olefin group to form a staple through the olefin group
  SITE 12: note = (S)-2-amino-3-(2-(trifluoromethyl)phenyl)propanoic acid
  SITE 13: note = (S)-2-amino-3-(benzo[b]thiophen-3-yl)propanoic acid
  SITE 14: note = L-glutamic acid, useful for stapling/stapled with another amino acid residue comprising a side chain amino group to form a staple through the 4-carboxyl group
  SITE 15: note = C-term amino
XDXXDXXAFKXXXEL

SEQ ID NO: 94 - protein, 15 aa, synthetic construct
  SITE 1: note = N-term Acetic Acid
  SITE 1: note = (R)-2-allylpyrrolidine-2-carboxylic acid, useful for stapling/stapled with another amino acid residue comprising an olefin group to form a staple through the olefin group
  SITE 3: note = (S)-2-amino-4,4-dimethylpentanoic acid
  VARIANT 4: note = 2-amino-2-(pent-4-en-1-yl)hept-6-enoic acid, useful for stapling/stapled with another amino acid residue comprising an olefin group to form a staple through one of the two olefin groups and/or with another amino acid residue comprising an olefin group to form a staple through the other of the two olefin groups
  SITE 6: note = (S)-3-(2-amino-2-carboxyethyl)benzoic acid
  SITE 7: note = (S)-2-amino-3-cyclohexylpropanoic acid
  SITE 10: note = L-lysine, useful for stapling/stapled with another amino acid residue comprising a side chain acid group to form a staple through the 6-amino group
  SITE 11: note (S)-3-amino-1-((pent-4-en-1-yloxy)carbonyl)pyrrolidine-3-ca rboxylic acid, useful for stapling/stapled with another amino acid residue comprising an olefin group to form a staple through the olefin group
  SITE 12: note = (S)-2-amino-3-(2-(trifluoromethyl)phenyl)propanoic acid
  SITE 13: note = (S)-2-amino-3-(benzo[b]thiophen-3-yl)propanoic acid
  SITE 14: note = L-glutamic acid, useful for stapling/stapled with another amino acid residue comprising a side chain amino group to form a staple through the 4-carboxyl group
  SITE 15: note = C-term amino
XDXXDXXAFKXXXEL

SEQ ID NO: 95 - protein, 15 aa, synthetic construct
  SITE 1: note = N-term Acetic Acid
  SITE 1: note = (R)-2-allylpyrrolidine-2-carboxylic acid, useful for stapling/stapled with another amino acid residue comprising an olefin group to form a staple through the olefin group
  SITE 3: note = (S)-2-amino-4,4-dimethylpentanoic acid
  VARIANT 4: note = 2-amino-2-(pent-4-en-1-yl)hept-6-enoic acid, useful for stapling/stapled with another amino acid residue comprising an olefin group to form a staple through one of the two olefin groups and/or with another amino acid residue comprising an olefin group to form a staple through the other of the two olefin groups
  SITE 6: note (S)-2-amino-3-((carboxymethyl)(2,2,2-trifluoroethyl)amino) propanoic acid
  SITE 10: note = L-lysine, useful for stapling/stapled with another amino acid residue comprising a side chain acid group to form a staple through the 6-amino group
  SITE 11: note (S)-3-amino-1-((pent-4-en-1-yloxy)carbonyl)pyrrolidine-3-ca rboxylic acid, useful for stapling/stapled with another amino acid residue comprising an olefin group to form a staple through the olefin group
  SITE 12: note = (S)-2-amino-3-(2-(trifluoromethyl)phenyl)propanoic acid
  SITE 13: note = (S)-2-amino-3-(benzo[b]thiophen-3-yl)propanoic acid
  SITE 14: note = L-glutamic acid, useful for stapling/stapled with another amino acid residue comprising a side chain amino group to form a staple through the 4-carboxyl group
  SITE 15: note = C-term amino
XDXXDXAAFKXXXEA

SEQ ID NO: 96 - protein, 15 aa, synthetic construct
  SITE 1: note = N-term Acetic Acid
  SITE 1: note = (R)-2-allylpyrrolidine-2-carboxylic acid, useful for stapling/stapled with another amino acid residue comprising an olefin group to form a staple through the olefin group
  SITE 3: note = (S)-2-amino-4,4-dimethylpentanoic acid
  VARIANT 4: note = 2-amino-2-(pent-4-en-1-yl)hept-6-enoic acid, useful for stapling/stapled with another amino acid residue comprising an olefin group to form a staple through one of the two olefin groups and/or with another amino acid residue comprising an olefin group to form a staple through the other of the two olefin groups
  SITE 6: note (S)-2-amino-3-((carboxymethyl)(2,2,2-trifluoroethyl)amino) propanoic acid
  SITE 10: note = L-lysine, useful for stapling/stapled with another amino acid residue comprising a side chain acid group to form a staple through the 6-amino group
  SITE 11: note (S)-3-amino-1-((pent-4-en-1-yloxy)carbonyl)pyrrolidine-3-ca rboxylic acid, useful for stapling/stapled with another amino acid residue comprising an olefin group to form a staple through the olefin group
  SITE 12: note = (S)-2-amino-3-(2-(trifluoromethyl)phenyl)propanoic acid
  SITE 13: note = (S)-2-amino-3-(benzo[b]thiophen-3-yl)propanoic acid
  SITE 14: note = L-glutamic acid, useful for stapling/stapled with another amino acid residue comprising a side chain amino group to form a staple through the 4-carboxyl group
  SITE 15: note = C-term amino
XNXXDXAAFKXXXEA

SEQ ID NO: 97 - protein, 15 aa, synthetic construct
  SITE 1: note = N-term Acetic Acid
  SITE 1: note = (R)-2-allylpyrrolidine-2-carboxylic acid, useful for stapling/stapled with another amino acid residue comprising an olefin group to form a staple through the olefin group
  SITE 2: note = L-homoserine
  SITE 3: note = (S)-2-amino-4,4-dimethylpentanoic acid
  VARIANT 4: note = 2-amino-2-(pent-4-en-1-yl)hept-6-enoic acid, useful for stapling/stapled with another amino acid residue comprising an olefin group to form a staple through one of the two olefin groups and/or with another amino acid residue comprising an olefin group to form a staple through the other of the two olefin groups
  SITE 6: note (S)-2-amino-3-((carboxymethyl)(2,2,2-trifluoroethyl)amino) propanoic acid
  SITE 10: note = L-lysine, useful for stapling/stapled with another amino acid residue comprising a side chain acid group to form a staple through the 6-amino group
  SITE 11: note (S)-3-amino-1-((pent-4-en-1-yloxy)carbonyl)pyrrolidine-3-ca rboxylic acid, useful for stapling/stapled with another amino acid residue comprising an olefin group to form a staple through the olefin group
  SITE 12: note = (S)-2-amino-3-(2-(trifluoromethyl)phenyl)propanoic acid
  SITE 13: note = (S)-2-amino-3-(benzo[b]thiophen-3-yl)propanoic acid
  SITE 14: note = L-glutamic acid, useful for stapling/stapled with another amino acid residue comprising a side chain amino group to form a staple through the 4-carboxyl group
  SITE 15: note = C-term amino
XSXXDXAAFKXXXEA

SEQ ID NO: 98 - protein, 15 aa, synthetic construct
  SITE 1: note = N-term Acetic Acid
  SITE 1: note = (R)-2-allylpyrrolidine-2-carboxylic acid, useful for stapling/stapled with another amino acid residue comprising an olefin group to form a staple through the olefin group
  SITE 3: note = (S)-2-amino-4,4-dimethylpentanoic acid
  VARIANT 4: note = 2-amino-2-(pent-4-en-1-yl)hept-6-enoic acid, useful for stapling/stapled with another amino acid residue comprising an olefin group to form a staple through one of the two olefin groups and/or with another amino acid residue comprising an olefin group to form a staple through the other of the two olefin groups
  SITE 6: note (S)-2-amino-3-((carboxymethyl)(2,2,2-trifluoroethyl)amino) propanoic acid
  SITE 10: note = L-lysine, useful for stapling/stapled with another amino acid residue comprising a side chain acid group to form a staple through the 6-amino group
  SITE 11: note (S)-3-amino-1-((pent-4-en-1-yloxy)carbonyl)pyrrolidine-3-ca rboxylic acid, useful for stapling/stapled with another amino acid residue comprising an olefin group to form a staple through the olefin group
  SITE 12: note = (S)-2-amino-3-(2-(trifluoromethyl)phenyl)propanoic acid
  SITE 13: note = (S)-2-amino-3-(benzo[b]thiophen-3-yl)propanoic acid
  SITE 14: note = L-glutamic acid, useful for stapling/stapled with another amino acid residue comprising a side chain amino group to form a staple through the 4-carboxyl group
  SITE 15: note = C-term amino
XDXXNXAAFKXXXEA

SEQ ID NO: 99 - protein, 15 aa, synthetic construct
  SITE 1: note = N-term Acetic Acid
  SITE 1: note = (R)-2-allylpyrrolidine-2-carboxylic acid, useful for stapling/stapled with another amino acid residue comprising an olefin group to form a staple through the olefin group
  SITE 3: note = (S)-2-amino-4,4-dimethylpentanoic acid
  VARIANT 4: note = 2-amino-2-(pent-4-en-1-yl)hept-6-enoic acid, useful for stapling/stapled with another amino acid residue comprising an olefin group to form a staple through one of the two olefin groups and/or with another amino acid residue comprising an olefin group to form a staple through the other of the two olefin groups
  SITE 5: note = L-homoserine
  SITE 6: note (S)-2-amino-3-((carboxymethyl)(2,2,2-trifluoroethyl)amino) propanoic acid
  SITE 10: note = L-lysine, useful for stapling/stapled with another amino acid residue comprising a side chain acid group to form a staple through the 6-amino group
  SITE 11: note (S)-3-amino-1-((pent-4-en-1-yloxy)carbonyl)pyrrolidine-3-ca rboxylic acid, useful for stapling/stapled with another amino acid residue comprising an olefin group to form a staple through the olefin group
  SITE 12: note = (S)-2-amino-3-(2-(trifluoromethyl)phenyl)propanoic acid
  SITE 13: note = (S)-2-amino-3-(benzo[b]thiophen-3-yl)propanoic acid
  SITE 14: note = L-glutamic acid, useful for stapling/stapled with another amino acid residue comprising a side chain amino group to form a staple through the 4-carboxyl group
  SITE 15: note = C-term amino
XDXXSXAAFKXXXEA

SEQ ID NO: 100 - protein, 15 aa, synthetic construct
  SITE 1: note = N-term Acetic Acid
  SITE 1: note = (R)-2-allylpyrrolidine-2-carboxylic acid, useful for stapling/stapled with another amino acid residue comprising an olefin group to form a staple through the olefin group
  SITE 3: note = (S)-2-amino-4,4-dimethylpentanoic acid
  VARIANT 4: note = 2-amino-2-(pent-4-en-1-yl)hept-6-enoic acid, useful for stapling/stapled with another amino acid residue comprising an olefin group to form a staple through one of the two olefin groups and/or with another amino acid residue comprising an olefin group to form a staple through the other of the two olefin groups
  SITE 6: note (S)-2-amino-3-((carboxymethyl)(2,2,2-trifluoroethyl)amino) propanoic acid
  SITE 7: note = 2-amino-2-methylpropanoic acid
  SITE 10: note = L-lysine, useful for stapling/stapled with another amino acid residue comprising a side chain acid group to form a staple through the 6-amino group
  SITE 11: note (S)-3-amino-1-((pent-4-en-1-yloxy)carbonyl)pyrrolidine-3-ca rboxylic acid, useful for stapling/stapled with another amino acid residue comprising an olefin group to form a staple through the olefin group
  SITE 12: note = (S)-2-amino-3-(2-(trifluoromethyl)phenyl)propanoic acid
  SITE 13: note = (S)-2-amino-3-(benzo[b]thiophen-3-yl)propanoic acid
  SITE 14: note = L-glutamic acid, useful for stapling/stapled with another amino acid residue comprising a side chain amino group to form a staple through the 4-carboxyl group
  SITE 15: note = C-term amino
XDXXDXXAFKXXXEA

SEQ ID NO: 101 - protein, 15 aa, synthetic construct
  SITE 1: note = N-term Acetic Acid
  SITE 1: note = (R)-2-allylpyrrolidine-2-carboxylic acid, useful for stapling/stapled with another amino acid residue comprising an olefin group to form a staple through the olefin group
  SITE 3: note = (S)-2-amino-4,4-dimethylpentanoic acid
  VARIANT 4: note = 2-amino-2-(pent-4-en-1-yl)hept-6-enoic acid, useful for stapling/stapled with another amino acid residue comprising an olefin group to form a staple through one of the two olefin groups and/or with another amino acid residue comprising an olefin group to form a staple through the other of the two olefin groups
  SITE 6: note (S)-2-amino-3-((carboxymethyl)(2,2,2-trifluoroethyl)amino) propanoic acid
  SITE 10: note = L-lysine, useful for stapling/stapled with another amino acid residue comprising a side chain acid group to form a staple through the 6-amino group
  SITE 11: note (S)-3-amino-1-((pent-4-en-1-yloxy)carbonyl)pyrrolidine-3-ca rboxylic acid, useful for stapling/stapled with another amino acid residue comprising an olefin group to form a staple through the olefin group
  SITE 12: note = (S)-2-amino-3-(2-(trifluoromethyl)phenyl)propanoic acid
  SITE 13: note = (S)-2-amino-3-(benzo[b]thiophen-3-yl)propanoic acid
  SITE 14: note = L-glutamic acid, useful for stapling/stapled with another amino acid residue comprising a side chain amino group to form a staple through the 4-carboxyl group
  SITE 15: note = C-term amino
XDXXDXLAFKXXXEA

SEQ ID NO: 102 - protein, 15 aa, synthetic construct
  SITE 1: note = N-term Acetic Acid
  SITE 1: note = (R)-2-allylpyrrolidine-2-carboxylic acid, useful for stapling/stapled with another amino acid residue comprising an olefin group to form a staple through the olefin group
  SITE 3: note = (S)-2-amino-4,4-dimethylpentanoic acid
  VARIANT 4: note = 2-amino-2-(pent-4-en-1-yl)hept-6-enoic acid, useful for stapling/stapled with another amino acid residue comprising an olefin group to form a staple through one of the two olefin groups and/or with another amino acid residue comprising an olefin group to form a staple through the other of the two olefin groups
  SITE 6: note (S)-2-amino-3-((carboxymethyl)(2,2,2-trifluoroethyl)amino) propanoic acid
  SITE 10: note = L-lysine, useful for stapling/stapled with another amino acid residue comprising a side chain acid group to form a staple through the 6-amino group
  SITE 11: note (S)-3-amino-1-((pent-4-en-1-yloxy)carbonyl)pyrrolidine-3-ca rboxylic acid, useful for stapling/stapled with another amino acid residue comprising an olefin group to form a staple through the olefin group
  SITE 12: note = (S)-2-amino-3-(2-(trifluoromethyl)phenyl)propanoic acid
  SITE 13: note = (S)-2-amino-3-(benzo[b]thiophen-3-yl)propanoic acid
  SITE 14: note = L-glutamic acid, useful for stapling/stapled with another amino acid residue comprising a side chain amino group to form a staple through the 4-carboxyl group
  SITE 15: note = C-term amino
XDXXDXFAFKXXXEA

SEQ ID NO: 103 - protein, 15 aa, synthetic construct
  SITE 1: note = N-term Acetic Acid
  SITE 1: note = (R)-2-allylpyrrolidine-2-carboxylic acid, useful for stapling/stapled with another amino acid residue comprising an olefin group to form a staple through the olefin group
  SITE 3: note = (S)-2-amino-4,4-dimethylpentanoic acid
  VARIANT 4: note = 2-amino-2-(pent-4-en-1-yl)hept-6-enoic acid, useful for stapling/stapled with another amino acid residue comprising an olefin group to form a staple through one of the two olefin groups and/or with another amino acid residue comprising an olefin group to form a staple through the other of the two olefin groups
  SITE 6: note (S)-2-amino-3-((carboxymethyl)(2,2,2-trifluoroethyl)amino) propanoic acid
  SITE 10: note = L-lysine, useful for stapling/stapled with another amino acid residue comprising a side chain acid group to form a staple through the 6-amino group
  SITE 11: note (S)-3-amino-1-((pent-4-en-1-yloxy)carbonyl)pyrrolidine-3-ca rboxylic acid, useful for stapling/stapled with another amino acid residue comprising an olefin group to form a staple through the olefin group
  SITE 12: note = (S)-2-amino-3-(2-(trifluoromethyl)phenyl)propanoic acid
  SITE 13: note = (S)-2-amino-3-(benzo[b]thiophen-3-yl)propanoic acid
  SITE 14: note = L-glutamic acid, useful for stapling/stapled with another amino acid residue comprising a side chain amino group to form a staple through the 4-carboxyl group
  SITE 15: note = C-term amino
XDXXDXVAFKXXXEA

SEQ ID NO: 104 - protein, 15 aa, synthetic construct
  SITE 1: note = N-term Acetic Acid
  SITE 1: note = (R)-2-allylpyrrolidine-2-carboxylic acid, useful for stapling/stapled with another amino acid residue comprising an olefin group to form a staple through the olefin group
  SITE 3: note = (S)-2-amino-4,4-dimethylpentanoic acid
  VARIANT 4: note = 2-amino-2-(pent-4-en-1-yl)hept-6-enoic acid, useful for stapling/stapled with another amino acid residue comprising an olefin group to form a staple through one of the two olefin groups and/or with another amino acid residue comprising an olefin group to form a staple through the other of the two olefin groups
  SITE 6: note (S)-2-amino-3-((carboxymethyl)(2,2,2-trifluoroethyl)amino) propanoic acid
  SITE 10: note = L-lysine, useful for stapling/stapled with another amino acid residue comprising a side chain acid group to form a staple through the 6-amino group
  SITE 11: note (S)-3-amino-1-((pent-4-en-1-yloxy)carbonyl)pyrrolidine-3-ca rboxylic acid, useful for stapling/stapled with another amino acid residue comprising an olefin group to form a staple through the olefin group
  SITE 12: note = (S)-2-amino-3-(2-(trifluoromethyl)phenyl)propanoic acid
  SITE 13: note = (S)-2-amino-3-(benzo[b]thiophen-3-yl)propanoic acid
  SITE 14: note = L-glutamic acid, useful for stapling/stapled with another amino acid residue comprising a side chain amino group to form a staple through the 4-carboxyl group
  SITE 15: note = 2-amino-2-methylpropanoic acid
  SITE 15: note = C-term amino
XDXXDXAAFKXXXEX

SEQ ID NO: 105 - protein, 15 aa, synthetic construct
  SITE 1: note = N-term Acetic Acid
  SITE 1: note = (R)-2-allylpyrrolidine-2-carboxylic acid, useful for stapling/stapled with another amino acid residue comprising an olefin group to form a staple through the olefin group
  SITE 3: note = (S)-2-amino-4,4-dimethylpentanoic acid
  VARIANT 4: note = 2-amino-2-(pent-4-en-1-yl)hept-6-enoic acid, useful for stapling/stapled with another amino acid residue comprising an olefin group to form a staple through one of the two olefin groups and/or with another amino acid residue comprising an olefin group to form a staple through the other of the two olefin groups
  SITE 6: note (S)-2-amino-3-((carboxymethyl)(2,2,2-trifluoroethyl)amino) propanoic acid
  SITE 10: note = L-lysine, useful for stapling/stapled with another amino acid residue comprising a side chain acid group to form a staple through the 6-amino group
  SITE 11: note (S)-3-amino-1-((pent-4-en-1-yloxy)carbonyl)pyrrolidine-3-ca rboxylic acid, useful for stapling/stapled with another amino acid residue comprising an olefin group to form a staple through the olefin group
  SITE 12: note = (S)-2-amino-3-(2-(trifluoromethyl)phenyl)propanoic acid
  SITE 13: note = (S)-2-amino-3-(benzo[b]thiophen-3-yl)propanoic acid
  SITE 14: note = L-glutamic acid, useful for stapling/stapled with another amino acid residue comprising a side chain amino group to form a staple through the 4-carboxyl group
  SITE 15: note = C-term amino
XDXXDXAAFKXXXEL

SEQ ID NO: 106 - protein, 15 aa, synthetic construct
  SITE 1: note = N-term Acetic Acid
  SITE 1: note = (R)-2-allylpyrrolidine-2-carboxylic acid, useful for stapling/stapled with another amino acid residue comprising an olefin group to form a staple through the olefin group
  SITE 3: note = (S)-2-amino-4,4-dimethylpentanoic acid
  VARIANT 4: note = 2-amino-2-(pent-4-en-1-yl)hept-6-enoic acid, useful for stapling/stapled with another amino acid residue comprising an olefin group to form a staple through one of the two olefin groups and/or with another amino acid residue comprising an olefin group to form a staple through the other of the two olefin groups
  SITE 6: note (S)-2-amino-3-((carboxymethyl)(2,2,2-trifluoroethyl)amino) propanoic acid
  SITE 10: note = L-lysine, useful for stapling/stapled with another amino acid residue comprising a side chain acid group to form a staple through the 6-amino group
  SITE 11: note (S)-3-amino-1-((pent-4-en-1-yloxy)carbonyl)pyrrolidine-3-ca rboxylic acid, useful for stapling/stapled with another amino acid residue comprising an olefin group to form a staple through the olefin group
  SITE 12: note = (S)-2-amino-3-(2-(trifluoromethyl)phenyl)propanoic acid
  SITE 13: note = (S)-2-amino-3-(benzo[b]thiophen-3-yl)propanoic acid
  SITE 14: note = L-glutamic acid, useful for stapling/stapled with another amino acid residue comprising a side chain amino group to form a staple through the 4-carboxyl group
  SITE 15: note = C-term amino
XDXXDXAAFKXXXEV

SEQ ID NO: 107 - protein, 15 aa, synthetic construct
  SITE 1: note = N-term Acetic Acid
  SITE 1: note = (R)-2-allylpyrrolidine-2-carboxylic acid, useful for stapling/stapled with another amino acid residue comprising an olefin group to form a staple through the olefin group
  SITE 3: note = (S)-2-amino-4,4-dimethylpentanoic acid
  VARIANT 4: note = 2-amino-2-(pent-4-en-1-yl)hept-6-enoic acid, useful for stapling/stapled with another amino acid residue comprising an olefin group to form a staple through one of the two olefin groups and/or with another amino acid residue comprising an olefin group to form a staple through the other of the two olefin groups
  SITE 6: note = (S)-3-(2-amino-2-carboxyethyl)benzoic acid
  SITE 7: note = L-glutamic acid, useful for stapling/stapled with another amino acid residue comprising a side chain amino group to form a staple through the acid group in the side chain
  SITE 11: note (S)-3-amino-1-((pent-4-en-1-yloxy)carbonyl)pyrrolidine-3-ca rboxylic acid, useful for stapling/stapled with another amino acid residue comprising an olefin group to form a staple through the olefin group
  SITE 12: note = (S)-2-amino-3-(2-(trifluoromethyl)phenyl)propanoic acid
  SITE 13: note = (S)-2-amino-3-(benzo[b]thiophen-3-yl)propanoic acid
  SITE 14: note (S)-2-amino-5-oxo-5-(3,9-diazaspiro[5.5]undecan-3-yl) pentanoic acid, useful for stapling/stapled with another amino acid residue comprising a side chain acid group to form a staple through the amino group in the side chain
  SITE 15: note = C-term amino
XDXXDXEAFLXXXXA

SEQ ID NO: 108 - protein, 15 aa, synthetic construct
  SITE 1: note = N-term Acetic Acid
  SITE 1: note = (R)-2-allylpyrrolidine-2-carboxylic acid, useful for stapling/stapled with another amino acid residue comprising an olefin group to form a staple through the olefin group
  SITE 3: note = (S)-2-amino-4,4-dimethylpentanoic acid
  VARIANT 4: note = 2-amino-2-(pent-4-en-1-yl)hept-6-enoic acid, useful for stapling/stapled with another amino acid residue comprising an olefin group to form a staple through one of the two olefin groups and/or with another amino acid residue comprising an olefin group to form a staple through the other of the two olefin groups
  SITE 6: note = (S)-3-(2-amino-2-carboxyethyl)benzoic acid
  SITE 7: note = L-glutamic acid, useful for stapling/stapled with another amino acid residue comprising a side chain amino group to form a staple through the acid group in the side chain
  SITE 11: note (S)-3-amino-1-((pent-4-en-1-yloxy)carbonyl)pyrrolidine-3-ca rboxylic acid, useful for stapling/stapled with another amino acid residue comprising an olefin group to form a staple through the olefin group
  SITE 12: note = (S)-2-amino-3-(2-(trifluoromethyl)phenyl)propanoic acid
  SITE 13: note = (S)-2-amino-3-(benzo[b]thiophen-3-yl)propanoic acid
  SITE 14: note (S)-2-amino-5-oxo-5-(2,9-diazaspiro[5.5]undecan-2-yl)pentan oic acid, useful for stapling/stapled with another amino acid residue comprising a side chain acid group to form a staple through the amino group in the side chain
  SITE 15: note = C-term amino
XDXXDXEAFLXXXXA

SEQ ID NO: 109 - protein, 15 aa, synthetic construct
  SITE 1: note = N-term Acetic Acid
  SITE 1: note = (R)-2-allylpyrrolidine-2-carboxylic acid, useful for stapling/stapled with another amino acid residue comprising an olefin group to form a staple through the olefin group
  SITE 3: note = (S)-2-amino-4,4-dimethylpentanoic acid
  VARIANT 4: note = 2-amino-2-(pent-4-en-1-yl)hept-6-enoic acid, useful for stapling/stapled with another amino acid residue comprising an olefin group to form a staple through one of the two olefin groups and/or with another amino acid residue comprising an olefin group to form a staple through the other of the two olefin groups
  SITE 6: note = (S)-3-(2-amino-2-carboxyethyl)benzoic acid
  SITE 7: note (S)-2-amino-5-oxo-5-(2,9-diazaspiro[5.5]undecan-2-yl)pentan oic acid, useful for stapling/stapled with another amino acid residue comprising a side chain acid group to form a staple through the amino group in the side chain
  SITE 11: note (S)-3-amino-1-((pent-4-en-1-yloxy)carbonyl)pyrrolidine-3-ca rboxylic acid, useful for stapling/stapled with another amino acid residue comprising an olefin group to form a staple through the olefin group
  SITE 12: note = (S)-2-amino-3-(2-(trifluoromethyl)phenyl)propanoic acid
  SITE 13: note = (S)-2-amino-3-(benzo[b]thiophen-3-yl)propanoic acid
  SITE 14: note = L-glutamic acid, useful for stapling/stapled with another amino acid residue comprising a side chain amino group to form a staple through the acid group in the side chain
  SITE 15: note = C-term amino
XDXXDXXAFLXXXEA

SEQ ID NO: 110 - protein, 16 aa, synthetic construct
  SITE 1: note = N-term Acetic Acid
  SITE 1: note = (R)-2-allylpyrrolidine-2-carboxylic acid, useful for stapling/stapled with another amino acid residue comprising an olefin group to form a staple through the olefin group
  SITE 3: note = (S)-2-amino-4,4-dimethylpentanoic acid
  VARIANT 4: note = 2-amino-2-(pent-4-en-1-yl)hept-6-enoic acid, useful for stapling/stapled with another amino acid residue comprising an olefin group to form a staple through one of the two olefin groups and/or with another amino acid residue comprising an olefin group to form a staple through the other of the two olefin groups
  SITE 6: note = (S)-3-(2-amino-2-carboxyethyl)benzoic acid
  SITE 10: note = L-lysine, useful for stapling/stapled with another amino acid residue comprising a side chain acid group to form a staple through the 6-amino group
  SITE 11: note (S)-3-amino-1-((pent-4-en-1-yloxy)carbonyl)pyrrolidine-3-ca rboxylic acid, useful for stapling/stapled with another amino acid residue comprising an olefin group to form a staple through the olefin group
  SITE 12: note = (S)-2-amino-3-(2-(trifluoromethyl)phenyl)propanoic acid
  SITE 13: note = (S)-2-amino-3-(benzo[b]thiophen-3-yl)propanoic acid
  SITE 14: note = L-glutamic acid, useful for stapling/stapled with another amino acid residue comprising a side chain amino group to form a staple through the 4-carboxyl group
  SITE 16: note = C-term amino
XDXXDXAAFKXXXELS

SEQ ID NO: 111 - protein, 16 aa, synthetic construct
  SITE 1: note = N-term Acetic Acid
  SITE 1: note = (R)-2-allylpyrrolidine-2-carboxylic acid, useful for stapling/stapled with another amino acid residue comprising an olefin group to form a staple through the olefin group
  SITE 3: note = (S)-2-amino-4,4-dimethylpentanoic acid
  VARIANT 4: note = 2-amino-2-(pent-4-en-1-yl)hept-6-enoic acid, useful for stapling/stapled with another amino acid residue comprising an olefin group to form a staple through one of the two olefin groups and/or with another amino acid residue comprising an olefin group to form a staple through the other of the two olefin groups
  SITE 6: note = (S)-3-(2-amino-2-carboxyethyl)benzoic acid
  SITE 7: note = (S)-2-aminohexanoic acid
  SITE 10: note = L-lysine, useful for stapling/stapled with another amino acid residue comprising a side chain acid group to form a staple through the 6-amino group
  SITE 11: note (S)-3-amino-1-((pent-4-en-1-yloxy)carbonyl)pyrrolidine-3-ca rboxylic acid, useful for stapling/stapled with another amino acid residue comprising an olefin group to form a staple through the olefin group
  SITE 12: note = (S)-2-amino-3-(2-(trifluoromethyl)phenyl)propanoic acid
  SITE 13: note = (S)-2-amino-3-(benzo[b]thiophen-3-yl)propanoic acid
  SITE 14: note = L-glutamic acid, useful for stapling/stapled with another amino acid residue comprising a side chain amino group to form a staple through the 4-carboxyl group
  SITE 16: note = C-term amino
XDXXDXXAFKXXXELS

SEQ ID NO: 112 - protein, 16 aa, synthetic construct
  SITE 1: note = N-term Acetic Acid
  SITE 1: note = (R)-2-allylpyrrolidine-2-carboxylic acid, useful for stapling/stapled with another amino acid residue comprising an olefin group to form a staple through the olefin group
  SITE 3: note = (S)-2-amino-4,4-dimethylpentanoic acid
  VARIANT 4: note = 2-amino-2-(pent-4-en-1-yl)hept-6-enoic acid, useful for stapling/stapled with another amino acid residue comprising an olefin group to form a staple through one of the two olefin groups and/or with another amino acid residue comprising an olefin group to form a staple through the other of the two olefin groups
  SITE 6: note = (S)-3-(2-amino-2-carboxyethyl)benzoic acid
  SITE 7: note = 2-amino-2-methylpropanoic acid
  SITE 10: note = L-lysine, useful for stapling/stapled with another amino acid residue comprising a side chain acid group to form a staple through the 6-amino group
  SITE 11: note (S)-3-amino-1-((pent-4-en-1-yloxy)carbonyl)pyrrolidine-3-ca rboxylic acid, useful for stapling/stapled with another amino acid residue comprising an olefin group to form a staple through the olefin group
  SITE 12: note = (S)-2-amino-3-(2-(trifluoromethyl)phenyl)propanoic acid
  SITE 13: note = (S)-2-amino-3-(benzo[b]thiophen-3-yl)propanoic acid
  SITE 14: note = L-glutamic acid, useful for stapling/stapled with another amino acid residue comprising a side chain amino group to form a staple through the 4-carboxyl group
  SITE 16: note = C-term amino
XDXXDXXAFKXXXELS

SEQ ID NO: 113 - protein, 16 aa, synthetic construct
  SITE 1: note = N-term Acetic Acid
  SITE 1: note = (R)-2-allylpyrrolidine-2-carboxylic acid, useful for stapling/stapled with another amino acid residue comprising an olefin group to form a staple through the olefin group
  SITE 3: note = (S)-2-amino-4,4-dimethylpentanoic acid
  VARIANT 4: note = 2-amino-2-(pent-4-en-1-yl)hept-6-enoic acid, useful for stapling/stapled with another amino acid residue comprising an olefin group to form a staple through one of the two olefin groups and/or with another amino acid residue comprising an olefin group to form a staple through the other of the two olefin groups
  SITE 6: note = (S)-3-(2-amino-2-carboxyethyl)benzoic acid
  SITE 7: note = 1-aminocyclopropane-1-carboxylic acid
  SITE 10: note = L-lysine, useful for stapling/stapled with another amino acid residue comprising a side chain acid group to form a staple through the 6-amino group
  SITE 11: note (S)-3-amino-1-((pent-4-en-1-yloxy)carbonyl)pyrrolidine-3-ca rboxylic acid, useful for stapling/stapled with another amino acid residue comprising an olefin group to form a staple through the olefin group
  SITE 12: note = (S)-2-amino-3-(2-(trifluoromethyl)phenyl)propanoic acid
  SITE 13: note = (S)-2-amino-3-(benzo[b]thiophen-3-yl)propanoic acid
  SITE 14: note = L-glutamic acid, useful for stapling/stapled with another amino acid residue comprising a side chain amino group to form a staple through the 4-carboxyl group
  SITE 16: note = C-term amino
XDXXDXXAFKXXXELS

SEQ ID NO: 114 - protein, 16 aa, synthetic construct
  SITE 1: note = N-term Acetic Acid
  SITE 1: note = (R)-2-allylpyrrolidine-2-carboxylic acid, useful for stapling/stapled with another amino acid residue comprising an olefin group to form a staple through the olefin group
  SITE 3: note = (S)-2-amino-4,4-dimethylpentanoic acid
  VARIANT 4: note = 2-amino-2-(pent-4-en-1-yl)hept-6-enoic acid, useful for stapling/stapled with another amino acid residue comprising an olefin group to form a staple through one of the two olefin groups and/or with another amino acid residue comprising an olefin group to form a staple through the other of the two olefin groups
  SITE 6: note = (S)-3-(2-amino-2-carboxyethyl)benzoic acid
  SITE 7: note = 1-aminocyclobutane-1-carboxylic acid
  SITE 10: note = L-lysine, useful for stapling/stapled with another amino acid residue comprising a side chain acid group to form a staple through the 6-amino group
  SITE 11: note (S)-3-amino-1-((pent-4-en-1-yloxy)carbonyl)pyrrolidine-3-ca rboxylic acid, useful for stapling/stapled with another amino acid residue comprising an olefin group to form a staple through the olefin group
  SITE 12: note = (S)-2-amino-3-(2-(trifluoromethyl)phenyl)propanoic acid
  SITE 13: note = (S)-2-amino-3-(benzo[b]thiophen-3-yl)propanoic acid
  SITE 14: note = L-glutamic acid, useful for stapling/stapled with another amino acid residue comprising a side chain amino group to form a staple through the 4-carboxyl group
  SITE 16: note = C-term amino
XDXXDXXAFKXXXELS

SEQ ID NO: 115 - protein, 16 aa, synthetic construct
  SITE 1: note = N-term Acetic Acid
  SITE 1: note = (R)-2-allylpyrrolidine-2-carboxylic acid, useful for stapling/stapled with another amino acid residue comprising an olefin group to form a staple through the olefin group
  SITE 3: note = (S)-2-amino-4,4-dimethylpentanoic acid
  VARIANT 4: note = 2-amino-2-(pent-4-en-1-yl)hept-6-enoic acid, useful for stapling/stapled with another amino acid residue comprising an olefin group to form a staple through one of the two olefin groups and/or with another amino acid residue comprising an olefin group to form a staple through the other of the two olefin groups
  SITE 6: note = (S)-3-(2-amino-2-carboxyethyl)benzoic acid
  SITE 7: note = 1-aminocyclopentane-1-carboxylic acid
  SITE 10: note = L-lysine, useful for stapling/stapled with another amino acid residue comprising a side chain acid group to form a staple through the 6-amino group
  SITE 11: note (S)-3-amino-1-((pent-4-en-1-yloxy)carbonyl)pyrrolidine-3-ca rboxylic acid, useful for stapling/stapled with another amino acid residue comprising an olefin group to form a staple through the olefin group
  SITE 12: note = (S)-2-amino-3-(2-(trifluoromethyl)phenyl)propanoic acid
  SITE 13: note = (S)-2-amino-3-(benzo[b]thiophen-3-yl)propanoic acid
  SITE 14: note = L-glutamic acid, useful for stapling/stapled with another amino acid residue comprising a side chain amino group to form a staple through the 4-carboxyl group
  SITE 16: note = C-term amino
XDXXDXXAFKXXXELS

SEQ ID NO: 116 - protein, 16 aa, synthetic construct
  SITE 1: note = N-term Acetic Acid
  SITE 1: note = (R)-2-allylpyrrolidine-2-carboxylic acid, useful for stapling/stapled with another amino acid residue comprising an olefin group to form a staple through the olefin group
  SITE 3: note = (S)-2-amino-4,4-dimethylpentanoic acid
  VARIANT 4: note = 2-amino-2-(pent-4-en-1-yl)hept-6-enoic acid, useful for stapling/stapled with another amino acid residue comprising an olefin group to form a staple through one of the two olefin groups and/or with another amino acid residue comprising an olefin group to form a staple through the other of the two olefin groups
  SITE 6: note = (S)-3-(2-amino-2-carboxyethyl)benzoic acid
  SITE 10: note = L-lysine, useful for stapling/stapled with another amino acid residue comprising a side chain acid group to form a staple through the 6-amino group
  SITE 11: note (S)-3-amino-1-((pent-4-en-1-yloxy)carbonyl)pyrrolidine-3-ca rboxylic acid, useful for stapling/stapled with another amino acid residue comprising an olefin group to form a staple through the olefin group
  SITE 12: note = (S)-2-amino-3-(2-(trifluoromethyl)phenyl)propanoic acid
  SITE 13: note = (S)-2-amino-3-(benzo[b]thiophen-3-yl)propanoic acid
  SITE 14: note = L-glutamic acid, useful for stapling/stapled with another amino acid residue comprising a side chain amino group to form a staple through the 4-carboxyl group
  SITE 16: note = C-term amino
XNXXDXAAFKXXXELS

SEQ ID NO: 117 - protein, 16 aa, synthetic construct
  SITE 1: note = N-term Acetic Acid
  SITE 1: note = (R)-2-allylpyrrolidine-2-carboxylic acid, useful for stapling/stapled with another amino acid residue comprising an olefin group to form a staple through the olefin group
  SITE 3: note = (S)-2-amino-4,4-dimethylpentanoic acid
  VARIANT 4: note = 2-amino-2-(pent-4-en-1-yl)hept-6-enoic acid, useful for stapling/stapled with another amino acid residue comprising an olefin group to form a staple through one of the two olefin groups and/or with another amino acid residue comprising an olefin group to form a staple through the other of the two olefin groups
  SITE 6: note = (S)-3-(2-amino-2-carboxyethyl)benzoic acid
  SITE 7: note = (S)-2-aminohexanoic acid
  SITE 10: note = L-lysine, useful for stapling/stapled with another amino acid residue comprising a side chain acid group to form a staple through the 6-amino group
  SITE 11: note (S)-3-amino-1-((pent-4-en-1-yloxy)carbonyl)pyrrolidine-3-ca rboxylic acid, useful for stapling/stapled with another amino acid residue comprising an olefin group to form a staple through the olefin group
  SITE 12: note = (S)-2-amino-3-(2-(trifluoromethyl)phenyl)propanoic acid
  SITE 13: note = (S)-2-amino-3-(benzo[b]thiophen-3-yl)propanoic acid
  SITE 14: note = L-glutamic acid, useful for stapling/stapled with another amino acid residue comprising a side chain amino group to form a staple through the 4-carboxyl group
  SITE 16: note = C-term amino
XNXXDXXAFKXXXELS

SEQ ID NO: 118 - protein, 16 aa, synthetic construct
  SITE 1: note = N-term Acetic Acid
  SITE 1: note = (R)-2-allylpyrrolidine-2-carboxylic acid, useful for stapling/stapled with another amino acid residue comprising an olefin group to form a staple through the olefin group
  SITE 3: note = (S)-2-amino-4,4-dimethylpentanoic acid
  VARIANT 4: note = 2-amino-2-(pent-4-en-1-yl)hept-6-enoic acid, useful for stapling/stapled with another amino acid residue comprising an olefin group to form a staple through one of the two olefin groups and/or with another amino acid residue comprising an olefin group to form a staple through the other of the two olefin groups
  SITE 6: note = (S)-3-(2-amino-2-carboxyethyl)benzoic acid
  SITE 7: note = 2-amino-2-methylpropanoic acid
  SITE 10: note = L-lysine, useful for stapling/stapled with another amino acid residue comprising a side chain acid group to form a staple through the 6-amino group
  SITE 11: note (S)-3-amino-1-((pent-4-en-1-yloxy)carbonyl)pyrrolidine-3-ca rboxylic acid, useful for stapling/stapled with another amino acid residue comprising an olefin group to form a staple through the olefin group
  SITE 12: note = (S)-2-amino-3-(2-(trifluoromethyl)phenyl)propanoic acid
  SITE 13: note = (S)-2-amino-3-(benzo[b]thiophen-3-yl)propanoic acid
  SITE 14: note = L-glutamic acid, useful for stapling/stapled with another amino acid residue comprising a side chain amino group to form a staple through the 4-carboxyl group
  SITE 16: note = C-term amino
XNXXDXXAFKXXXELS

SEQ ID NO: 119 - protein, 16 aa, synthetic construct
  SITE 1: note = N-term Acetic Acid
  SITE 1: note = (R)-2-allylpyrrolidine-2-carboxylic acid, useful for stapling/stapled with another amino acid residue comprising an olefin group to form a staple through the olefin group
  SITE 2: note = L-homoserine
  SITE 3: note = (S)-2-amino-4,4-dimethylpentanoic acid
  VARIANT 4: note = 2-amino-2-(pent-4-en-1-yl)hept-6-enoic acid, useful for stapling/stapled with another amino acid residue comprising an olefin group to form a staple through one of the two olefin groups and/or with another amino acid residue comprising an olefin group to form a staple through the other of the two olefin groups
  SITE 6: note = (S)-3-(2-amino-2-carboxyethyl)benzoic acid
  SITE 10: note = L-lysine, useful for stapling/stapled with another amino acid residue comprising a side chain acid group to form a staple through the 6-amino group
  SITE 11: note (S)-3-amino-1-((pent-4-en-1-yloxy)carbonyl)pyrrolidine-3-ca rboxylic acid, useful for stapling/stapled with another amino acid residue comprising an olefin group to form a staple through the olefin group
  SITE 12: note = (S)-2-amino-3-(2-(trifluoromethyl)phenyl)propanoic acid
  SITE 13: note = (S)-2-amino-3-(benzo[b]thiophen-3-yl)propanoic acid
  SITE 14: note = L-glutamic acid, useful for stapling/stapled with another amino acid residue comprising a side chain amino group to form a staple through the 4-carboxyl group
  SITE 16: note = C-term amino
XSXXDXAAFKXXXELS

SEQ ID NO: 120 - protein, 16 aa, synthetic construct
  SITE 1: note = N-term Acetic Acid
  SITE 1: note = (R)-2-allylpyrrolidine-2-carboxylic acid, useful for stapling/stapled with another amino acid residue comprising an olefin group to form a staple through the olefin group
  SITE 2: note = L-homoserine
  SITE 3: note = (S)-2-amino-4,4-dimethylpentanoic acid
  VARIANT 4: note = 2-amino-2-(pent-4-en-1-yl)hept-6-enoic acid, useful for stapling/stapled with another amino acid residue comprising an olefin group to form a staple through one of the two olefin groups and/or with another amino acid residue comprising an olefin group to form a staple through the other of the two olefin groups
  SITE 6: note = (S)-3-(2-amino-2-carboxyethyl)benzoic acid
  SITE 7: note = (S)-2-aminohexanoic acid
  SITE 10: note = L-lysine, useful for stapling/stapled with another amino acid residue comprising a side chain acid group to form a staple through the 6-amino group
  SITE 11: note (S)-3-amino-1-((pent-4-en-1-yloxy)carbonyl)pyrrolidine-3-ca rboxylic acid, useful for stapling/stapled with another amino acid residue comprising an olefin group to form a staple through the olefin group
  SITE 12: note = (S)-2-amino-3-(2-(trifluoromethyl)phenyl)propanoic acid
  SITE 13: note = (S)-2-amino-3-(benzo[b]thiophen-3-yl)propanoic acid
  SITE 14: note = L-glutamic acid, useful for stapling/stapled with another amino acid residue comprising a side chain amino group to form a staple through the 4-carboxyl group
  SITE 16: note = C-term amino
XSXXDXXAFKXXXELS

SEQ ID NO: 121 - protein, 16 aa, synthetic construct
  SITE 1: note = N-term Acetic Acid
  SITE 1: note = (R)-2-allylpyrrolidine-2-carboxylic acid, useful for stapling/stapled with another amino acid residue comprising an olefin group to form a staple through the olefin group
  SITE 2: note = L-homoserine
  SITE 3: note = (S)-2-amino-4,4-dimethylpentanoic acid
  VARIANT 4: note = 2-amino-2-(pent-4-en-1-yl)hept-6-enoic acid, useful for stapling/stapled with another amino acid residue comprising an olefin group to form a staple through one of the two olefin groups and/or with another amino acid residue comprising an olefin group to form a staple through the other of the two olefin groups
  SITE 6: note = (S)-3-(2-amino-2-carboxyethyl)benzoic acid
  SITE 7: note = 2-amino-2-methylpropanoic acid
  SITE 10: note = L-lysine, useful for stapling/stapled with another amino acid residue comprising a side chain acid group to form a staple through the 6-amino group
  SITE 11: note (S)-3-amino-1-((pent-4-en-1-yloxy)carbonyl)pyrrolidine-3-ca rboxylic acid, useful for stapling/stapled with another amino acid residue comprising an olefin group to form a staple through the olefin group
  SITE 12: note = (S)-2-amino-3-(2-(trifluoromethyl)phenyl)propanoic acid
  SITE 13: note = (S)-2-amino-3-(benzo[b]thiophen-3-yl)propanoic acid
  SITE 14: note = L-glutamic acid, useful for stapling/stapled with another amino acid residue comprising a side chain amino group to form a staple through the 4-carboxyl group
  SITE 16: note = C-term amino
XSXXDXXAFKXXXELS

SEQ ID NO: 122 - protein, 14 aa, synthetic construct
  SITE 1: note = N-term Acetic Acid
  SITE 1: note = (R)-2-allylpyrrolidine-2-carboxylic acid, useful for stapling/stapled with another amino acid residue comprising an olefin group to form a staple through the olefin group
  SITE 3: note = (S)-2-amino-3-cyclohexylpropanoic acid
  VARIANT 4: note = 2-amino-2-(pent-4-en-1-yl)hept-6-enoic acid, useful for stapling/stapled with another amino acid residue comprising an olefin group to form a staple through one of the two olefin groups and/or with another amino acid residue comprising an olefin group to form a staple through the other of the two olefin groups
  SITE 7: note = L-homoserine
  SITE 10: note = L-glutamic acid, useful for stapling/stapled with another amino acid residue comprising a side chain amino group to form a staple through the 4-carboxyl group
  SITE 11: note (S)-3-amino-1-((pent-4-en-1-yloxy)carbonyl)pyrrolidine-3-ca rboxylic acid, useful for stapling/stapled with another amino acid residue comprising an olefin group to form a staple through the olefin group
  SITE 13: note = (S)-2-amino-3-(benzo[b]thiophen-3-yl)propanoic acid
  SITE 14: note = L-lysine, useful for stapling/stapled with another amino acid residue comprising a side chain acid group to form a staple through the 6-amino group
  SITE 14: note = C-term amino
XNXXDQSAFEXFXK

SEQ ID NO: 123 - protein, 14 aa, synthetic construct
  SITE 1: note = N-term Acetic Acid
  SITE 1: note = (R)-2-allylpyrrolidine-2-carboxylic acid, useful for stapling/stapled with another amino acid residue comprising an olefin group to form a staple through the olefin group
  SITE 3: note = (S)-2-amino-3-cyclohexylpropanoic acid
  VARIANT 4: note = 2-amino-2-(pent-4-en-1-yl)hept-6-enoic acid, useful for stapling/stapled with another amino acid residue comprising an olefin group to form a staple through one of the two olefin groups and/or with another amino acid residue comprising an olefin group to form a staple through the other of the two olefin groups
  SITE 7: note = N6-isopropyl-L-lysine
  SITE 10: note = L-glutamic acid, useful for stapling/stapled with another amino acid residue comprising a side chain amino group to form a staple through the 4-carboxyl group
  SITE 11: note (S)-3-amino-1-((pent-4-en-1-yloxy)carbonyl)pyrrolidine-3-ca rboxylic acid, useful for stapling/stapled with another amino acid residue comprising an olefin group to form a staple through the olefin group
  SITE 13: note = (S)-2-amino-3-(benzo[b]thiophen-3-yl)propanoic acid
  SITE 14: note = L-lysine, useful for stapling/stapled with another amino acid residue comprising a side chain acid group to form a staple through the 6-amino group
  SITE 14: note = C-term amino
XNXXDQKAFEXFXK

SEQ ID NO: 124 - protein, 14 aa, synthetic construct
  SITE 1: note = N-term Acetic Acid
  SITE 1: note = (R)-2-allylpyrrolidine-2-carboxylic acid, useful for stapling/stapled with another amino acid residue comprising an olefin group to form a staple through the olefin group
  SITE 3: note = (S)-2-amino-3-cyclohexylpropanoic acid
  VARIANT 4: note = 2-amino-2-(pent-4-en-1-yl)hept-6-enoic acid, useful for stapling/stapled with another amino acid residue comprising an olefin group to form a staple through one of the two olefin groups and/or with another amino acid residue comprising an olefin group to form a staple through the other of the two olefin groups
  SITE 7: note = N6-isopropyl-L-lysine
  SITE 10: note = L-glutamic acid, useful for stapling/stapled with another amino acid residue comprising a side chain amino group to form a staple through the 4-carboxyl group
  SITE 11: note (S)-3-amino-1-((pent-4-en-1-yloxy)carbonyl)pyrrolidine-3-ca rboxylic acid, useful for stapling/stapled with another amino acid residue comprising an olefin group to form a staple through the olefin group
  SITE 13: note = (S)-2-amino-3-(benzo[b]thiophen-3-yl)propanoic acid
  SITE 14: note = L-lysine, useful for stapling/stapled with another amino acid residue comprising a side chain acid group to form a staple through the 6-amino group
  SITE 14: note = C-term amino
XNXXDTKAFEXFXK

SEQ ID NO: 125 - protein, 14 aa, synthetic construct
  SITE 1: note = N-term Acetic Acid
  SITE 1: note = (R)-2-allylpyrrolidine-2-carboxylic acid, useful for stapling/stapled with another amino acid residue comprising an olefin group to form a staple through the olefin group
  SITE 3: note = (S)-2-amino-3-cyclohexylpropanoic acid
  VARIANT 4: note = 2-amino-2-(pent-4-en-1-yl)hept-6-enoic acid, useful for stapling/stapled with another amino acid residue comprising an olefin group to form a staple through one of the two olefin groups and/or with another amino acid residue comprising an olefin group to form a staple through the other of the two olefin groups
  SITE 7: note = L-homoserine
  SITE 10: note = L-glutamic acid, useful for stapling/stapled with another amino acid residue comprising a side chain amino group to form a staple through the 4-carboxyl group
  SITE 11: note (S)-3-amino-1-((pent-4-en-1-yloxy)carbonyl)pyrrolidine-3-ca rboxylic acid, useful for stapling/stapled with another amino acid residue comprising an olefin group to form a staple through the olefin group
  SITE 12: note = (S)-2-amino-3-(thiophen-3-yl)propanoic acid
  SITE 13: note = (S)-2-amino-3-(benzo[b]thiophen-3-yl)propanoic acid
  SITE 14: note = L-lysine, useful for stapling/stapled with another amino acid residue comprising a side chain acid group to form a staple through the 6-amino group
  SITE 14: note = C-term amino
XNXXDQSAFEXXXK

SEQ ID NO: 126 - protein, 14 aa, synthetic construct
  SITE 1: note = N-term Acetic Acid
  SITE 1: note = (R)-2-allylpyrrolidine-2-carboxylic acid, useful for stapling/stapled with another amino acid residue comprising an olefin group to form a staple through the olefin group
  SITE 3: note = (S)-2-amino-3-cyclohexylpropanoic acid
  VARIANT 4: note = 2-amino-2-(pent-4-en-1-yl)hept-6-enoic acid, useful for stapling/stapled with another amino acid residue comprising an olefin group to form a staple through one of the two olefin groups and/or with another amino acid residue comprising an olefin group to form a staple through the other of the two olefin groups
  SITE 7: note = N6-isopropyl-L-lysine
  SITE 10: note = L-glutamic acid, useful for stapling/stapled with another amino acid residue comprising a side chain amino group to form a staple through the 4-carboxyl group
  SITE 11: note (S)-3-amino-1-((pent-4-en-1-yloxy)carbonyl)pyrrolidine-3-ca rboxylic acid, useful for stapling/stapled with another amino acid residue comprising an olefin group to form a staple through the olefin group
  SITE 12: note = (S)-2-amino-3-(thiophen-3-yl)propanoic acid
  SITE 13: note = (S)-2-amino-3-(benzo[b]thiophen-3-yl)propanoic acid
  SITE 14: note = L-lysine, useful for stapling/stapled with another amino acid residue comprising a side chain acid group to form a staple through the 6-amino group
  SITE 14: note = C-term amino
XNXXDQKAFEXXXK

SEQ ID NO: 127 - protein, 14 aa, synthetic construct
  SITE 1: note = N-term Acetic Acid
  SITE 1: note = (R)-2-allylpyrrolidine-2-carboxylic acid, useful for stapling/stapled with another amino acid residue comprising an olefin group to form a staple through the olefin group
  SITE 3: note = (S)-2-amino-3-cyclohexylpropanoic acid
  VARIANT 4: note = 2-amino-2-(pent-4-en-1-yl)hept-6-enoic acid, useful for stapling/stapled with another amino acid residue comprising an olefin group to form a staple through one of the two olefin groups and/or with another amino acid residue comprising an olefin group to form a staple through the other of the two olefin groups
  SITE 7: note = L-homoserine
  SITE 10: note = L-glutamic acid, useful for stapling/stapled with another amino acid residue comprising a side chain amino group to form a staple through the 4-carboxyl group
  SITE 11: note (S)-3-amino-1-((pent-4-en-1-yloxy)carbonyl)pyrrolidine-3-ca rboxylic acid, useful for stapling/stapled with another amino acid residue comprising an olefin group to form a staple through the olefin group
  SITE 13: note = (S)-2-amino-3-(benzo[b]thiophen-3-yl)propanoic acid
  SITE 14: note = L-lysine, useful for stapling/stapled with another amino acid residue comprising a side chain acid group to form a staple through the 6-amino group
  SITE 14: note = C-term amino
XNXXDTSAFEXFXK

SEQ ID NO: 128 - protein, 15 aa, synthetic construct
  SITE 1: note = N-term Acetic Acid
  SITE 1: note = (R)-2-allylpyrrolidine-2-carboxylic acid, useful for stapling/stapled with another amino acid residue comprising an olefin group to form a staple through the olefin group
  SITE 3: note = (S)-2-amino-4,4-dimethylpentanoic acid
  VARIANT 4: note = 2-amino-2-(pent-4-en-1-yl)hept-6-enoic acid, useful for stapling/stapled with another amino acid residue comprising an olefin group to form a staple through one of the two olefin groups and/or with another amino acid residue comprising an olefin group to form a staple through the other of the two olefin groups
  SITE 6: note = (S)-3-(2-amino-2-carboxyethyl)benzoic acid
  SITE 7: note = 2-amino-2-methylpropanoic acid
  SITE 10: note = L-lysine, useful for stapling/stapled with another amino acid residue comprising a side chain acid group to form a staple through the 6-amino group
  SITE 11: note (S)-3-amino-1-((pent-4-en-1-yloxy)carbonyl)pyrrolidine-3-ca rboxylic acid, useful for stapling/stapled with another amino acid residue comprising an olefin group to form a staple through the olefin group
  SITE 12: note = (S)-2-amino-3-(thiophen-3-yl)propanoic acid
  SITE 13: note = (S)-2-amino-3-(benzo[b]thiophen-3-yl)propanoic acid
  SITE 14: note = L-glutamic acid, useful for stapling/stapled with another amino acid residue comprising a side chain amino group to form a staple through the 4-carboxyl group
  SITE 15: note = C-term amino
XNXXDXXAFKXXXEA

SEQ ID NO: 129 - protein, 15 aa, synthetic construct
  SITE 1: note = N-term Acetic Acid
  SITE 1: note = (R)-2-allylpyrrolidine-2-carboxylic acid, useful for stapling/stapled with another amino acid residue comprising an olefin group to form a staple through the olefin group
  SITE 3: note = (S)-2-amino-4,4-dimethylpentanoic acid
  VARIANT 4: note = 2-amino-2-(pent-4-en-1-yl)hept-6-enoic acid, useful for stapling/stapled with another amino acid residue comprising an olefin group to form a staple through one of the two olefin groups and/or with another amino acid residue comprising an olefin group to form a staple through the other of the two olefin groups
  SITE 6: note = (S)-3-(2-amino-2-carboxyethyl)benzoic acid
  SITE 7: note = 2-amino-2-methylpropanoic acid
  SITE 10: note = L-lysine, useful for stapling/stapled with another amino acid residue comprising a side chain acid group to form a staple through the 6-amino group
  SITE 11: note (S)-3-amino-1-((pent-4-en-1-yloxy)carbonyl)pyrrolidine-3-ca rboxylic acid, useful for stapling/stapled with another amino acid residue comprising an olefin group to form a staple through the olefin group
  SITE 12: note = (S)-2-amino-3-(thiophen-3-yl)propanoic acid
  SITE 13: note = (S)-2-amino-3-(benzo[b]thiophen-3-yl)propanoic acid
  SITE 14: note = L-glutamic acid, useful for stapling/stapled with another amino acid residue comprising a side chain amino group to form a staple through the 4-carboxyl group
  SITE 15: note = C-term amino
XSXXDXXAFKXXXEA

SEQ ID NO: 130 - protein, 15 aa, synthetic construct
  SITE 1: note = N-term Acetic Acid
  SITE 1: note = (R)-2-allylpyrrolidine-2-carboxylic acid, useful for stapling/stapled with another amino acid residue comprising an olefin group to form a staple through the olefin group
  SITE 3: note = (S)-2-amino-4,4-dimethylpentanoic acid
  VARIANT 4: note = 2-amino-2-(pent-4-en-1-yl)hept-6-enoic acid, useful for stapling/stapled with another amino acid residue comprising an olefin group to form a staple through one of the two olefin groups and/or with another amino acid residue comprising an olefin group to form a staple through the other of the two olefin groups
  SITE 6: note = (S)-3-(2-amino-2-carboxyethyl)benzoic acid
  SITE 7: note = 2-amino-2-methylpropanoic acid
  SITE 10: note = L-lysine, useful for stapling/stapled with another amino acid residue comprising a side chain acid group to form a staple through the 6-amino group
  SITE 11: note (S)-3-amino-1-((pent-4-en-1-yloxy)carbonyl)pyrrolidine-3-ca rboxylic acid, useful for stapling/stapled with another amino acid residue comprising an olefin group to form a staple through the olefin group
  SITE 12: note = (S)-2-amino-3-(thiophen-3-yl)propanoic acid
  SITE 13: note = (S)-2-amino-3-(benzo[b]thiophen-3-yl)propanoic acid
  SITE 14: note = L-glutamic acid, useful for stapling/stapled with another amino acid residue comprising a side chain amino group to form a staple through the 4-carboxyl group
  SITE 15: note = C-term amino
XTXXDXXAFKXXXEA

SEQ ID NO: 131 - protein, 15 aa, synthetic construct
  SITE 1: note = N-term Acetic Acid
  SITE 1: note = (R)-2-allylpyrrolidine-2-carboxylic acid, useful for stapling/stapled with another amino acid residue comprising an olefin group to form a staple through the olefin group
  SITE 2: note = L-homoserine
  SITE 3: note = (S)-2-amino-4,4-dimethylpentanoic acid
  VARIANT 4: note = 2-amino-2-(pent-4-en-1-yl)hept-6-enoic acid, useful for stapling/stapled with another amino acid residue comprising an olefin group to form a staple through one of the two olefin groups and/or with another amino acid residue comprising an olefin group to form a staple through the other of the two olefin groups
  SITE 6: note = (S)-3-(2-amino-2-carboxyethyl)benzoic acid
  SITE 7: note = 2-amino-2-methylpropanoic acid
  SITE 10: note = L-lysine, useful for stapling/stapled with another amino acid residue comprising a side chain acid group to form a staple through the 6-amino group
  SITE 11: note (S)-3-amino-1-((pent-4-en-1-yloxy)carbonyl)pyrrolidine-3-ca rboxylic acid, useful for stapling/stapled with another amino acid residue comprising an olefin group to form a staple through the olefin group
  SITE 12: note = (S)-2-amino-3-(thiophen-3-yl)propanoic acid
  SITE 13: note = (S)-2-amino-3-(benzo[b]thiophen-3-yl)propanoic acid
  SITE 14: note = L-glutamic acid, useful for stapling/stapled with another amino acid residue comprising a side chain amino group to form a staple through the 4-carboxyl group
  SITE 15: note = C-term amino
XSXXDXXAFKXXXEA

SEQ ID NO: 132 - protein, 15 aa, synthetic construct
  SITE 1: note = N-term Acetic Acid
  SITE 1: note = (R)-2-allylpyrrolidine-2-carboxylic acid, useful for stapling/stapled with another amino acid residue comprising an olefin group to form a staple through the olefin group
  SITE 2: note = L-allothreonine
  SITE 3: note = (S)-2-amino-4,4-dimethylpentanoic acid
  VARIANT 4: note = 2-amino-2-(pent-4-en-1-yl)hept-6-enoic acid, useful for stapling/stapled with another amino acid residue comprising an olefin group to form a staple through one of the two olefin groups and/or with another amino acid residue comprising an olefin group to form a staple through the other of the two olefin groups
  SITE 6: note = (S)-3-(2-amino-2-carboxyethyl)benzoic acid
  SITE 7: note = 2-amino-2-methylpropanoic acid
  SITE 10: note = L-lysine, useful for stapling/stapled with another amino acid residue comprising a side chain acid group to form a staple through the 6-amino group
  SITE 11: note (S)-3-amino-1-((pent-4-en-1-yloxy)carbonyl)pyrrolidine-3-ca rboxylic acid, useful for stapling/stapled with another amino acid residue comprising an olefin group to form a staple through the olefin group
  SITE 12: note = (S)-2-amino-3-(thiophen-3-yl)propanoic acid
  SITE 13: note = (S)-2-amino-3-(benzo[b]thiophen-3-yl)propanoic acid
  SITE 14: note = L-glutamic acid, useful for stapling/stapled with another amino acid residue comprising a side chain amino group to form a staple through the 4-carboxyl group
  SITE 15: note = C-term amino
XTXXDXXAFKXXXEA

SEQ ID NO: 133 - protein, 15 aa, synthetic construct
  SITE 1: note = N-term Acetic Acid
  SITE 1: note = (R)-2-allylpyrrolidine-2-carboxylic acid, useful for stapling/stapled with another amino acid residue comprising an olefin group to form a staple through the olefin group
  SITE 2: note = N4-methyl-L-asparagine
  SITE 3: note = (S)-2-amino-4,4-dimethylpentanoic acid
  VARIANT 4: note = 2-amino-2-(pent-4-en-1-yl)hept-6-enoic acid, useful for stapling/stapled with another amino acid residue comprising an olefin group to form a staple through one of the two olefin groups and/or with another amino acid residue comprising an olefin group to form a staple through the other of the two olefin groups
  SITE 6: note = (S)-3-(2-amino-2-carboxyethyl)benzoic acid
  SITE 7: note = 2-amino-2-methylpropanoic acid
  SITE 10: note = L-lysine, useful for stapling/stapled with another amino acid residue comprising a side chain acid group to form a staple through the 6-amino group
  SITE 11: note (S)-3-amino-1-((pent-4-en-1-yloxy)carbonyl)pyrrolidine-3-ca rboxylic acid, useful for stapling/stapled with another amino acid residue comprising an olefin group to form a staple through the olefin group
  SITE 12: note = (S)-2-amino-3-(thiophen-3-yl)propanoic acid
  SITE 13: note = (S)-2-amino-3-(benzo[b]thiophen-3-yl)propanoic acid
  SITE 14: note = L-glutamic acid, useful for stapling/stapled with another amino acid residue comprising a side chain amino group to form a staple through the 4-carboxyl group
  SITE 15: note = C-term amino
XNXXDXXAFKXXXEA

SEQ ID NO: 134 - protein, 15 aa, synthetic construct
  SITE 1: note = N-term Acetic Acid
  SITE 1: note = (R)-2-allylpyrrolidine-2-carboxylic acid, useful for stapling/stapled with another amino acid residue comprising an olefin group to form a staple through the olefin group
  SITE 3: note = (S)-2-amino-4,4-dimethylpentanoic acid
  VARIANT 4: note = 2-amino-2-(pent-4-en-1-yl)hept-6-enoic acid, useful for stapling/stapled with another amino acid residue comprising an olefin group to form a staple through one of the two olefin groups and/or with another amino acid residue comprising an olefin group to form a staple through the other of the two olefin groups
  SITE 6: note = (S)-3-(2-amino-2-carboxyethyl)benzoic acid
  SITE 7: note = 2-amino-2-methylpropanoic acid
  SITE 10: note = L-lysine, useful for stapling/stapled with another amino acid residue comprising a side chain acid group to form a staple through the 6-amino group
  SITE 11: note (S)-3-amino-1-((pent-4-en-1-yloxy)carbonyl)pyrrolidine-3-ca rboxylic acid, useful for stapling/stapled with another amino acid residue comprising an olefin group to form a staple through the olefin group
  SITE 12: note = (S)-2-amino-3-(thiophen-3-yl)propanoic acid
  SITE 13: note = (S)-2-amino-3-(benzo[b]thiophen-3-yl)propanoic acid
  SITE 14: note = L-glutamic acid, useful for stapling/stapled with another amino acid residue comprising a side chain amino group to form a staple through the 4-carboxyl group
  SITE 15: note = C-term amino
XDXXNXXAFKXXXEA

SEQ ID NO: 135 - protein, 15 aa, synthetic construct
  SITE 1: note = N-term Acetic Acid
  SITE 1: note = (R)-2-allylpyrrolidine-2-carboxylic acid, useful for stapling/stapled with another amino acid residue comprising an olefin group to form a staple through the olefin group
  SITE 3: note = (S)-2-amino-4,4-dimethylpentanoic acid
  VARIANT 4: note = 2-amino-2-(pent-4-en-1-yl)hept-6-enoic acid, useful for stapling/stapled with another amino acid residue comprising an olefin group to form a staple through one of the two olefin groups and/or with another amino acid residue comprising an olefin group to form a staple through the other of the two olefin groups
  SITE 6: note = (S)-3-(2-amino-2-carboxyethyl)benzoic acid
  SITE 7: note = 2-amino-2-methylpropanoic acid
  SITE 10: note = L-lysine, useful for stapling/stapled with another amino acid residue comprising a side chain acid group to form a staple through the 6-amino group
  SITE 11: note (S)-3-amino-1-((pent-4-en-1-yloxy)carbonyl)pyrrolidine-3-ca rboxylic acid, useful for stapling/stapled with another amino acid residue comprising an olefin group to form a staple through the olefin group
  SITE 12: note = (S)-2-amino-3-(thiophen-3-yl)propanoic acid
  SITE 13: note = (S)-2-amino-3-(benzo[b]thiophen-3-yl)propanoic acid
  SITE 14: note = L-glutamic acid, useful for stapling/stapled with another amino acid residue comprising a side chain amino group to form a staple through the 4-carboxyl group
  SITE 15: note = C-term amino
XDXXSXXAFKXXXEA

SEQ ID NO: 136 - protein, 15 aa, synthetic construct
  SITE 1: note = N-term Acetic Acid
  SITE 1: note = (R)-2-allylpyrrolidine-2-carboxylic acid, useful for stapling/stapled with another amino acid residue comprising an olefin group to form a staple through the olefin group
  SITE 3: note = (S)-2-amino-4,4-dimethylpentanoic acid
  VARIANT 4: note = 2-amino-2-(pent-4-en-1-yl)hept-6-enoic acid, useful for stapling/stapled with another amino acid residue comprising an olefin group to form a staple through one of the two olefin groups and/or with another amino acid residue comprising an olefin group to form a staple through the other of the two olefin groups
  SITE 6: note = (S)-3-(2-amino-2-carboxyethyl)benzoic acid
  SITE 7: note = 2-amino-2-methylpropanoic acid
  SITE 10: note = L-lysine, useful for stapling/stapled with another amino acid residue comprising a side chain acid group to form a staple through the 6-amino group
  SITE 11: note (S)-3-amino-1-((pent-4-en-1-yloxy)carbonyl)pyrrolidine-3-ca rboxylic acid, useful for stapling/stapled with another amino acid residue comprising an olefin group to form a staple through the olefin group
  SITE 12: note = (S)-2-amino-3-(thiophen-3-yl)propanoic acid
  SITE 13: note = (S)-2-amino-3-(benzo[b]thiophen-3-yl)propanoic acid
  SITE 14: note = L-glutamic acid, useful for stapling/stapled with another amino acid residue comprising a side chain amino group to form a staple through the 4-carboxyl group
  SITE 15: note = C-term amino
XDXXTXXAFKXXXEA

SEQ ID NO: 137 - protein, 15 aa, synthetic construct
  SITE 1: note = N-term Acetic Acid
  SITE 1: note = (R)-2-allylpyrrolidine-2-carboxylic acid, useful for stapling/stapled with another amino acid residue comprising an olefin group to form a staple through the olefin group
  SITE 3: note = (S)-2-amino-4,4-dimethylpentanoic acid
  VARIANT 4: note = 2-amino-2-(pent-4-en-1-yl)hept-6-enoic acid, useful for stapling/stapled with another amino acid residue comprising an olefin group to form a staple through one of the two olefin groups and/or with another amino acid residue comprising an olefin group to form a staple through the other of the two olefin groups
  SITE 5: note = L-homoserine
  SITE 6: note = (S)-3-(2-amino-2-carboxyethyl)benzoic acid
  SITE 7: note = 2-amino-2-methylpropanoic acid
  SITE 10: note = L-lysine, useful for stapling/stapled with another amino acid residue comprising a side chain acid group to form a staple through the 6-amino group
  SITE 11: note (S)-3-amino-1-((pent-4-en-1-yloxy)carbonyl)pyrrolidine-3-ca rboxylic acid, useful for stapling/stapled with another amino acid residue comprising an olefin group to form a staple through the olefin group
  SITE 12: note = (S)-2-amino-3-(thiophen-3-yl)propanoic acid
  SITE 13: note = (S)-2-amino-3-(benzo[b]thiophen-3-yl)propanoic acid
  SITE 14: note = L-glutamic acid, useful for stapling/stapled with another amino acid residue comprising a side chain amino group to form a staple through the 4-carboxyl group
  SITE 15: note = C-term amino
XDXXSXXAFKXXXEA

SEQ ID NO: 138 - protein, 15 aa, synthetic construct
  SITE 1: note = N-term Acetic Acid
  SITE 1: note = (R)-2-allylpyrrolidine-2-carboxylic acid, useful for stapling/stapled with another amino acid residue comprising an olefin group to form a staple through the olefin group
  SITE 3: note = (S)-2-amino-4,4-dimethylpentanoic acid
  VARIANT 4: note = 2-amino-2-(pent-4-en-1-yl)hept-6-enoic acid, useful for stapling/stapled with another amino acid residue comprising an olefin group to form a staple through one of the two olefin groups and/or with another amino acid residue comprising an olefin group to form a staple through the other of the two olefin groups
  SITE 5: note = L-allothreonine
  SITE 6: note = (S)-3-(2-amino-2-carboxyethyl)benzoic acid
  SITE 7: note = 2-amino-2-methylpropanoic acid
  SITE 10: note = L-lysine, useful for stapling/stapled with another amino acid residue comprising a side chain acid group to form a staple through the 6-amino group
  SITE 11: note (S)-3-amino-1-((pent-4-en-1-yloxy)carbonyl)pyrrolidine-3-ca rboxylic acid, useful for stapling/stapled with another amino acid residue comprising an olefin group to form a staple through the olefin group
  SITE 12: note = (S)-2-amino-3-(thiophen-3-yl)propanoic acid
  SITE 13: note = (S)-2-amino-3-(benzo[b]thiophen-3-yl)propanoic acid
  SITE 14: note = L-glutamic acid, useful for stapling/stapled with another amino acid residue comprising a side chain amino group to form a staple through the 4-carboxyl group
  SITE 15: note = C-term amino
XDXXTXXAFKXXXEA

SEQ ID NO: 139 - protein, 15 aa, synthetic construct
  SITE 1: note = N-term Acetic Acid
  SITE 1: note = (R)-2-allylpyrrolidine-2-carboxylic acid, useful for stapling/stapled with another amino acid residue comprising an olefin group to form a staple through the olefin group
  SITE 3: note = (S)-2-amino-4,4-dimethylpentanoic acid
  VARIANT 4: note = 2-amino-2-(pent-4-en-1-yl)hept-6-enoic acid, useful for stapling/stapled with another amino acid residue comprising an olefin group to form a staple through one of the two olefin groups and/or with another amino acid residue comprising an olefin group to form a staple through the other of the two olefin groups
  SITE 5: note = N4-methyl-L-asparagine
  SITE 6: note = (S)-3-(2-amino-2-carboxyethyl)benzoic acid
  SITE 7: note = 2-amino-2-methylpropanoic acid
  SITE 10: note = L-lysine, useful for stapling/stapled with another amino acid residue comprising a side chain acid group to form a staple through the 6-amino group
  SITE 11: note (S)-3-amino-1-((pent-4-en-1-yloxy)carbonyl)pyrrolidine-3-ca rboxylic acid, useful for stapling/stapled with another amino acid residue comprising an olefin group to form a staple through the olefin group
  SITE 12: note = (S)-2-amino-3-(thiophen-3-yl)propanoic acid
  SITE 13: note = (S)-2-amino-3-(benzo[b]thiophen-3-yl)propanoic acid
  SITE 14: note = L-glutamic acid, useful for stapling/stapled with another amino acid residue comprising a side chain amino group to form a staple through the 4-carboxyl group
  SITE 15: note = C-term amino
XDXXNXXAFKXXXEA

SEQ ID NO: 140 - protein, 15 aa, synthetic construct
  SITE 1: note = N-term Acetic Acid
  SITE 1: note = (R)-2-allylpyrrolidine-2-carboxylic acid, useful for stapling/stapled with another amino acid residue comprising an olefin group to form a staple through the olefin group
  SITE 3: note = (S)-2-amino-4,4-dimethylpentanoic acid
  VARIANT 4: note = 2-amino-2-(pent-4-en-1-yl)hept-6-enoic acid, useful for stapling/stapled with another amino acid residue comprising an olefin group to form a staple through one of the two olefin groups and/or with another amino acid residue comprising an olefin group to form a staple through the other of the two olefin groups
  SITE 6: note = (S)-3-(2-amino-2-carboxyethyl)benzoic acid
  SITE 10: note = L-lysine, useful for stapling/stapled with another amino acid residue comprising a side chain acid group to form a staple through the 6-amino group
  SITE 11: note (S)-3-amino-1-((pent-4-en-1-yloxy)carbonyl)pyrrolidine-3-ca rboxylic acid, useful for stapling/stapled with another amino acid residue comprising an olefin group to form a staple through the olefin group
  SITE 12: note = (S)-2-amino-3-(thiophen-3-yl)propanoic acid
  SITE 13: note = (S)-2-amino-3-(benzo[b]thiophen-3-yl)propanoic acid
  SITE 14: note = (S)-2-aminohexanedioic acid, useful for stapling/stapled with another amino acid residue comprising a side chain amino group to form a staple through the 5-carboxyl group
  SITE 15: note = C-term amino
XDXXDXAAFKXXXXA

SEQ ID NO: 141 - protein, 15 aa, synthetic construct
  SITE 1: note = N-term Acetic Acid
  SITE 1: note = (R)-2-allylpyrrolidine-2-carboxylic acid, useful for stapling/stapled with another amino acid residue comprising an olefin group to form a staple through the olefin group
  SITE 3: note = (S)-2-amino-4,4-dimethylpentanoic acid
  VARIANT 4: note = 2-amino-2-(pent-4-en-1-yl)hept-6-enoic acid, useful for stapling/stapled with another amino acid residue comprising an olefin group to form a staple through one of the two olefin groups and/or with another amino acid residue comprising an olefin group to form a staple through the other of the two olefin groups
  SITE 6: note = (S)-3-(2-amino-2-carboxyethyl)benzoic acid
  SITE 10: note = L-lysine, useful for stapling/stapled with another amino acid residue comprising a side chain acid group to form a staple through the 6-amino group
  SITE 11: note (S)-3-amino-1-((pent-4-en-1-yloxy)carbonyl)pyrrolidine-3-ca rboxylic acid, useful for stapling/stapled with another amino acid residue comprising an olefin group to form a staple through the olefin group
  SITE 12: note = (S)-2-amino-3-(2-(trifluoromethyl)phenyl)propanoic acid
  SITE 13: note = (S)-2-amino-3-(benzo[b]thiophen-3-yl)propanoic acid
  SITE 14: note = (S)-2-aminohexanedioic acid, useful for stapling/stapled with another amino acid residue comprising a side chain amino group to form a staple through the 5-carboxyl group
  SITE 15: note = C-term amino
XDXXDXAAFKXXXXA

SEQ ID NO: 142 - protein, 15 aa, synthetic construct
  SITE 1: note = N-term Acetic Acid
  SITE 1: note = (R)-2-allylpyrrolidine-2-carboxylic acid, useful for stapling/stapled with another amino acid residue comprising an olefin group to form a staple through the olefin group
  SITE 3: note = (S)-2-amino-4,4-dimethylpentanoic acid
  VARIANT 4: note = 2-amino-2-(pent-4-en-1-yl)hept-6-enoic acid, useful for stapling/stapled with another amino acid residue comprising an olefin group to form a staple through one of the two olefin groups and/or with another amino acid residue comprising an olefin group to form a staple through the other of the two olefin groups
  SITE 6: note = (S)-3-(2-amino-2-carboxyethyl)benzoic acid
  SITE 10: note = (S)-2-aminohexanedioic acid, useful for stapling/stapled with another amino acid residue comprising a side chain amino group to form a staple through the 5-carboxyl group
  SITE 11: note (S)-3-amino-1-((pent-4-en-1-yloxy)carbonyl)pyrrolidine-3-ca rboxylic acid, useful for stapling/stapled with another amino acid residue comprising an olefin group to form a staple through the olefin group
  SITE 12: note = (S)-2-amino-3-(thiophen-3-yl)propanoic acid
  SITE 13: note = (S)-2-amino-3-(benzo[b]thiophen-3-yl)propanoic acid
  SITE 14: note = L-lysine, useful for stapling/stapled with another amino acid residue comprising a side chain acid group to form a staple through the 6-amino group
  SITE 15: note = C-term amino
XDXXDXAAFXXXXKA

SEQ ID NO: 143 - protein, 15 aa, synthetic construct
  SITE 1: note = N-term Acetic Acid
  SITE 1: note = (R)-2-allylpyrrolidine-2-carboxylic acid, useful for stapling/stapled with another amino acid residue comprising an olefin group to form a staple through the olefin group
  SITE 3: note = (S)-2-amino-4,4-dimethylpentanoic acid
  VARIANT 4: note = 2-amino-2-(pent-4-en-1-yl)hept-6-enoic acid, useful for stapling/stapled with another amino acid residue comprising an olefin group to form a staple through one of the two olefin groups and/or with another amino acid residue comprising an olefin group to form a staple through the other of the two olefin groups
  SITE 6: note = (S)-3-(2-amino-2-carboxyethyl)benzoic acid
  SITE 10: note = (S)-2-aminohexanedioic acid, useful for stapling/stapled with another amino acid residue comprising a side chain amino group to form a staple through the 5-carboxyl group
  SITE 11: note (S)-3-amino-1-((pent-4-en-1-yloxy)carbonyl)pyrrolidine-3-ca rboxylic acid, useful for stapling/stapled with another amino acid residue comprising an olefin group to form a staple through the olefin group
  SITE 12: note = (S)-2-amino-3-(2-(trifluoromethyl)phenyl)propanoic acid
  SITE 13: note = (S)-2-amino-3-(benzo[b]thiophen-3-yl)propanoic acid
  SITE 14: note = L-lysine, useful for stapling/stapled with another amino acid residue comprising a side chain acid group to form a staple through the 6-amino group
  SITE 15: note = C-term amino
XDXXDXAAFXXXXKA

SEQ ID NO: 144 - protein, 15 aa, synthetic construct
  SITE 1: note = N-term Acetic Acid
  SITE 1: note = (R)-2-allylpyrrolidine-2-carboxylic acid, useful for stapling/stapled with another amino acid residue comprising an olefin group to form a staple through the olefin group
  SITE 3: note = (S)-2-amino-4,4-dimethylpentanoic acid
  VARIANT 4: note = 2-amino-2-(pent-4-en-1-yl)hept-6-enoic acid, useful for stapling/stapled with another amino acid residue comprising an olefin group to form a staple through one of the two olefin groups and/or with another amino acid residue comprising an olefin group to form a staple through the other of the two olefin groups
  SITE 6: note = (S)-3-(2-amino-2-carboxyethyl)benzoic acid
  SITE 10: note = N6-isopropyl-L-lysine, useful for stapling/stapled with another amino acid residue comprising a side chain acid group to form a staple through the 6-amino group
  SITE 11: note (S)-3-amino-1-((pent-4-en-1-yloxy)carbonyl)pyrrolidine-3-ca rboxylic acid, useful for stapling/stapled with another amino acid residue comprising an olefin group to form a staple through the olefin group
  SITE 12: note = (S)-2-amino-3-(thiophen-3-yl)propanoic acid
  SITE 13: note = (S)-2-amino-3-(benzo[b]thiophen-3-yl)propanoic acid
  SITE 14: note = (S)-2-aminohexanedioic acid, useful for stapling/stapled with another amino acid residue comprising a side chain amino group to form a staple through the 5-carboxyl group
  SITE 15: note = C-term amino
XDXXDXAAFKXXXXA

SEQ ID NO: 145 - protein, 15 aa, synthetic construct
  SITE 1: note = N-term Acetic Acid
  SITE 1: note = (R)-2-allylpyrrolidine-2-carboxylic acid, useful for stapling/stapled with another amino acid residue comprising an olefin group to form a staple through the olefin group
  SITE 3: note = (S)-2-amino-4,4-dimethylpentanoic acid
  VARIANT 4: note = 2-amino-2-(pent-4-en-1-yl)hept-6-enoic acid, useful for stapling/stapled with another amino acid residue comprising an olefin group to form a staple through one of the two olefin groups and/or with another amino acid residue comprising an olefin group to form a staple through the other of the two olefin groups
  SITE 6: note = (S)-3-(2-amino-2-carboxyethyl)benzoic acid
  SITE 10: note = N6-isopropyl-L-lysine, useful for stapling/stapled with another amino acid residue comprising a side chain acid group to form a staple through the 6-amino group
  SITE 11: note (S)-3-amino-1-((pent-4-en-1-yloxy)carbonyl)pyrrolidine-3-ca rboxylic acid, useful for stapling/stapled with another amino acid residue comprising an olefin group to form a staple through the olefin group
  SITE 12: note = (S)-2-amino-3-(2-(trifluoromethyl)phenyl)propanoic acid
  SITE 13: note = (S)-2-amino-3-(benzo[b]thiophen-3-yl)propanoic acid
  SITE 14: note = (S)-2-aminohexanedioic acid, useful for stapling/stapled with another amino acid residue comprising a side chain amino group to form a staple through the 5-carboxyl group
  SITE 15: note = C-term amino
XDXXDXAAFKXXXXA

SEQ ID NO: 146 - protein, 15 aa, synthetic construct
  SITE 1: note = N-term Acetic Acid
  SITE 1: note = (R)-2-allylpyrrolidine-2-carboxylic acid, useful for stapling/stapled with another amino acid residue comprising an olefin group to form a staple through the olefin group
  SITE 3: note = (S)-2-amino-4,4-dimethylpentanoic acid
  VARIANT 4: note = 2-amino-2-(pent-4-en-1-yl)hept-6-enoic acid, useful for stapling/stapled with another amino acid residue comprising an olefin group to form a staple through one of the two olefin groups and/or with another amino acid residue comprising an olefin group to form a staple through the other of the two olefin groups
  SITE 6: note = (S)-3-(2-amino-2-carboxyethyl)benzoic acid
  SITE 10: note = (S)-2-aminohexanedioic acid, useful for stapling/stapled with another amino acid residue comprising a side chain amino group to form a staple through the 5-carboxyl group
  SITE 11: note (S)-3-amino-1-((pent-4-en-1-yloxy)carbonyl)pyrrolidine-3-ca rboxylic acid, useful for stapling/stapled with another amino acid residue comprising an olefin group to form a staple through the olefin group
  SITE 12: note = (S)-2-amino-3-(2-(trifluoromethyl)phenyl)propanoic acid
  SITE 13: note = (S)-2-amino-3-(benzo[b]thiophen-3-yl)propanoic acid
  SITE 14: note = N6-isopropyl-L-lysine, useful for stapling/stapled with another amino acid residue comprising a side chain acid group to form a staple through the 6-amino group
  SITE 15: note = C-term amino
XDXXDXAAFXXXXKA

SEQ ID NO: 147 - protein, 15 aa, synthetic construct
  SITE 1: note = N-term Acetic Acid
  SITE 1: note = (R)-2-allylpyrrolidine-2-carboxylic acid, useful for stapling/stapled with another amino acid residue comprising an olefin group to form a staple through the olefin group
  SITE 3: note = (S)-2-amino-4,4-dimethylpentanoic acid
  VARIANT 4: note = 2-amino-2-(pent-4-en-1-yl)hept-6-enoic acid, useful for stapling/stapled with another amino acid residue comprising an olefin group to form a staple through one of the two olefin groups and/or with another amino acid residue comprising an olefin group to form a staple through the other of the two olefin groups
  SITE 6: note = (S)-3-(2-amino-2-carboxyethyl)benzoic acid
  SITE 10: note = N6-isopropyl-L-lysine, useful for stapling/stapled with another amino acid residue comprising a side chain acid group to form a staple through the 6-amino group
  SITE 11: note (S)-3-amino-1-((pent-4-en-1-yloxy)carbonyl)pyrrolidine-3-ca rboxylic acid, useful for stapling/stapled with another amino acid residue comprising an olefin group to form a staple through the olefin group
  SITE 12: note = (S)-2-amino-3-(thiophen-3-yl)propanoic acid
  SITE 13: note = (S)-2-amino-3-(benzo[b]thiophen-3-yl)propanoic acid
  SITE 14: note = L-glutamic acid, useful for stapling/stapled with another amino acid residue comprising a side chain amino group to form a staple through the 4-carboxyl group
  SITE 15: note = C-term amino
XDXXDXAAFKXXXEA

SEQ ID NO: 148 - protein, 15 aa, synthetic construct
  SITE 1: note = N-term Acetic Acid
  SITE 1: note = (R)-2-allylpyrrolidine-2-carboxylic acid, useful for stapling/stapled with another amino acid residue comprising an olefin group to form a staple through the olefin group
  SITE 3: note = (S)-2-amino-4,4-dimethylpentanoic acid
  VARIANT 4: note = 2-amino-2-(pent-4-en-1-yl)hept-6-enoic acid, useful for stapling/stapled with another amino acid residue comprising an olefin group to form a staple through one of the two olefin groups and/or with another amino acid residue comprising an olefin group to form a staple through the other of the two olefin groups
  SITE 6: note = (S)-3-(2-amino-2-carboxyethyl)benzoic acid
  SITE 10: note = N6-isopropyl-L-lysine, useful for stapling/stapled with another amino acid residue comprising a side chain acid group to form a staple through the 6-amino group
  SITE 11: note (S)-3-amino-1-((pent-4-en-1-yloxy)carbonyl)pyrrolidine-3-ca rboxylic acid, useful for stapling/stapled with another amino acid residue comprising an olefin group to form a staple through the olefin group
  SITE 12: note = (S)-2-amino-3-(2-(trifluoromethyl)phenyl)propanoic acid
  SITE 13: note = (S)-2-amino-3-(benzo[b]thiophen-3-yl)propanoic acid
  SITE 14: note = L-glutamic acid, useful for stapling/stapled with another amino acid residue comprising a side chain amino group to form a staple through the 4-carboxyl group
  SITE 15: note = C-term amino
XDXXDXAAFKXXXEA

SEQ ID NO: 149 - protein, 15 aa, synthetic construct
  SITE 1: note = N-term Acetic Acid
  SITE 1: note = (R)-2-allylpyrrolidine-2-carboxylic acid, useful for stapling/stapled with another amino acid residue comprising an olefin group to form a staple through the olefin group
  SITE 3: note = (S)-2-amino-4,4-dimethylpentanoic acid
  VARIANT 4: note = 2-amino-2-(pent-4-en-1-yl)hept-6-enoic acid, useful for stapling/stapled with another amino acid residue comprising an olefin group to form a staple through one of the two olefin groups and/or with another amino acid residue comprising an olefin group to form a staple through the other of the two olefin groups
  SITE 6: note = (S)-3-(2-amino-2-carboxyethyl)benzoic acid
  SITE 10: note = L-glutamic acid, useful for stapling/stapled with another amino acid residue comprising a side chain amino group to form a staple through the 4-carboxyl group
  SITE 11: note (S)-3-amino-1-((pent-4-en-1-yloxy)carbonyl)pyrrolidine-3-ca rboxylic acid, useful for stapling/stapled with another amino acid residue comprising an olefin group to form a staple through the olefin group
  SITE 12: note = (S)-2-amino-3-(2-(trifluoromethyl)phenyl)propanoic acid
  SITE 13: note = (S)-2-amino-3-(benzo[b]thiophen-3-yl)propanoic acid
  SITE 14: note = N6-isopropyl-L-lysine, useful for stapling/stapled with another amino acid residue comprising a side chain acid group to form a staple through the 6-amino group
  SITE 15: note = C-term amino
XDXXDXAAFEXXXKA

SEQ ID NO: 150 - protein, 15 aa, synthetic construct
  SITE 1: note = N-term Acetic Acid
  SITE 1: note = (R)-2-allylpyrrolidine-2-carboxylic acid, useful for stapling/stapled with another amino acid residue comprising an olefin group to form a staple through the olefin group
  SITE 3: note = (S)-2-amino-4,4-dimethylpentanoic acid
  VARIANT 4: note = 2-amino-2-(pent-4-en-1-yl)hept-6-enoic acid, useful for stapling/stapled with another amino acid residue comprising an olefin group to form a staple through one of the two olefin groups and/or with another amino acid residue comprising an olefin group to form a staple through the other of the two olefin groups
  SITE 6: note = (S)-3-(2-amino-2-carboxyethyl)-2-hydroxybenzoic acid
  SITE 7: note = 2-amino-2-methylpropanoic acid
  SITE 10: note = L-lysine, useful for stapling/stapled with another amino acid residue comprising a side chain acid group to form a staple through the 6-amino group
  SITE 11: note (S)-3-amino-1-((pent-4-en-1-yloxy)carbonyl)pyrrolidine-3-ca rboxylic acid, useful for stapling/stapled with another amino acid residue comprising an olefin group to form a staple through the olefin group
  SITE 12: note = (S)-2-amino-3-(2-(trifluoromethyl)phenyl)propanoic acid
  SITE 13: note = (S)-2-amino-3-(benzo[b]thiophen-3-yl)propanoic acid
  SITE 14: note = L-glutamic acid, useful for stapling/stapled with another amino acid residue comprising a side chain amino group to form a staple through the 4-carboxyl group
  SITE 15: note = C-term amino
XDXXDXXAFKXXXEA

SEQ ID NO: 151 - protein, 15 aa, synthetic construct
  SITE 1: note = N-term Acetic Acid
  SITE 1: note = (R)-2-allylpyrrolidine-2-carboxylic acid, useful for stapling/stapled with another amino acid residue comprising an olefin group to form a staple through the olefin group
  SITE 3: note = (S)-2-amino-4,4-dimethylpentanoic acid
  VARIANT 4: note = 2-amino-2-(pent-4-en-1-yl)hept-6-enoic acid, useful for stapling/stapled with another amino acid residue comprising an olefin group to form a staple through one of the two olefin groups and/or with another amino acid residue comprising an olefin group to form a staple through the other of the two olefin groups
  SITE 6: note = (S)-5-(2-amino-2-carboxyethyl)-2-hydroxybenzoic acid
  SITE 7: note = 2-amino-2-methylpropanoic acid
  SITE 10: note = L-lysine, useful for stapling/stapled with another amino acid residue comprising a side chain acid group to form a staple through the 6-amino group
  SITE 11: note (S)-3-amino-1-((pent-4-en-1-yloxy)carbonyl)pyrrolidine-3-ca rboxylic acid, useful for stapling/stapled with another amino acid residue comprising an olefin group to form a staple through the olefin group
  SITE 12: note = (S)-2-amino-3-(2-(trifluoromethyl)phenyl)propanoic acid
  SITE 13: note = (S)-2-amino-3-(benzo[b]thiophen-3-yl)propanoic acid
  SITE 14: note = L-glutamic acid, useful for stapling/stapled with another amino acid residue comprising a side chain amino group to form a staple through the 4-carboxyl group
  SITE 15: note = C-term amino
XDXXDXXAFKXXXEA

SEQ ID NO: 152 - protein, 15 aa, synthetic construct
  SITE 1: note = N-term Acetic Acid
  SITE 1: note = (R)-2-allylpyrrolidine-2-carboxylic acid, useful for stapling/stapled with another amino acid residue comprising an olefin group to form a staple through the olefin group
  SITE 3: note = (S)-2-amino-4,4-dimethylpentanoic acid
  VARIANT 4: note = 2-amino-2-(pent-4-en-1-yl)hept-6-enoic acid, useful for stapling/stapled with another amino acid residue comprising an olefin group to form a staple through one of the two olefin groups and/or with another amino acid residue comprising an olefin group to form a staple through the other of the two olefin groups
  SITE 6: note (S)-3-(1-(2-amino-2-carboxyethyl)-1H-1,2,3-triazol-4-yl)-2, 2- dimethylpropanoic acid
  SITE 7: note = 2-amino-2-methylpropanoic acid
  SITE 10: note = L-lysine, useful for stapling/stapled with another amino acid residue comprising a side chain acid group to form a staple through the 6-amino group
  SITE 11: note (S)-3-amino-1-((pent-4-en-1-yloxy)carbonyl)pyrrolidine-3-ca rboxylic acid, useful for stapling/stapled with another amino acid residue comprising an olefin group to form a staple through the olefin group
  SITE 12: note = (S)-2-amino-3-(2-(trifluoromethyl)phenyl)propanoic acid
  SITE 13: note = (S)-2-amino-3-(benzo[b]thiophen-3-yl)propanoic acid
  SITE 14: note = L-glutamic acid, useful for stapling/stapled with another amino acid residue comprising a side chain amino group to form a staple through the 4-carboxyl group
  SITE 15: note = C-term amino
XDXXDXXAFKXXXEA

SEQ ID NO: 153 - protein, 15 aa, synthetic construct
  SITE 1: note = N-term Acetic Acid
  SITE 1: note = (R)-2-allylpyrrolidine-2-carboxylic acid, useful for stapling/stapled with another amino acid residue comprising an olefin group to form a staple through the olefin group
  SITE 3: note = (S)-2-amino-4,4-dimethylpentanoic acid
  VARIANT 4: note = 2-amino-2-(pent-4-en-1-yl)hept-6-enoic acid, useful for stapling/stapled with another amino acid residue comprising an olefin group to form a staple through one of the two olefin groups and/or with another amino acid residue comprising an olefin group to form a staple through the other of the two olefin groups
  SITE 6: note = (S)-4-(2-amino-2-carboxyethyl)benzoic acid
  SITE 7: note = 2-amino-2-methylpropanoic acid
  SITE 10: note = L-lysine, useful for stapling/stapled with another amino acid residue comprising a side chain acid group to form a staple through the 6-amino group
  SITE 11: note (S)-3-amino-1-((pent-4-en-1-yloxy)carbonyl)pyrrolidine-3-ca rboxylic acid, useful for stapling/stapled with another amino acid residue comprising an olefin group to form a staple through the olefin group
  SITE 12: note = (S)-2-amino-3-(2-(trifluoromethyl)phenyl)propanoic acid
  SITE 13: note = (S)-2-amino-3-(benzo[b]thiophen-3-yl)propanoic acid
  SITE 14: note = L-glutamic acid, useful for stapling/stapled with another amino acid residue comprising a side chain amino group to form a staple through the 4-carboxyl group
  SITE 15: note = C-term amino
XDXXDXXAFKXXXEA

SEQ ID NO: 154 - protein, 15 aa, synthetic construct
  SITE 1: note = N-term Acetic Acid
  SITE 1: note = (R)-2-allylpyrrolidine-2-carboxylic acid, useful for stapling/stapled with another amino acid residue comprising an olefin group to form a staple through the olefin group
  SITE 3: note = (S)-2-amino-4,4-dimethylpentanoic acid
  VARIANT 4: note = 2-amino-2-(pent-4-en-1-yl)hept-6-enoic acid, useful for stapling/stapled with another amino acid residue comprising an olefin group to form a staple through one of the two olefin groups and/or with another amino acid residue comprising an olefin group to form a staple through the other of the two olefin groups
  SITE 6: note = (S)-2-(2-amino-2-carboxyethyl)benzoic acid
  SITE 7: note = 2-amino-2-methylpropanoic acid
  SITE 10: note = L-lysine, useful for stapling/stapled with another amino acid residue comprising a side chain acid group to form a staple through the 6-amino group
  SITE 11: note (S)-3-amino-1-((pent-4-en-1-yloxy)carbonyl)pyrrolidine-3-ca rboxylic acid, useful for stapling/stapled with another amino acid residue comprising an olefin group to form a staple through the olefin group
  SITE 12: note = (S)-2-amino-3-(2-(trifluoromethyl)phenyl)propanoic acid
  SITE 13: note = (S)-2-amino-3-(benzo[b]thiophen-3-yl)propanoic acid
  SITE 14: note = L-glutamic acid, useful for stapling/stapled with another amino acid residue comprising a side chain amino group to form a staple through the 4-carboxyl group
  SITE 15: note = C-term amino
XDXXDXXAFKXXXEA

SEQ ID NO: 155 - protein, 15 aa, synthetic construct
  SITE 1: note = N-term Acetic Acid
  SITE 1: note = (R)-2-allylpyrrolidine-2-carboxylic acid, useful for stapling/stapled with another amino acid residue comprising an olefin group to form a staple through the olefin group
  SITE 3: note = (S)-2-amino-4,4-dimethylpentanoic acid
  VARIANT 4: note = 2-amino-2-(pent-4-en-1-yl)hept-6-enoic acid, useful for stapling/stapled with another amino acid residue comprising an olefin group to form a staple through one of the two olefin groups and/or with another amino acid residue comprising an olefin group to form a staple through the other of the two olefin groups
  SITE 7: note = 2-amino-2-methylpropanoic acid
  SITE 10: note = L-lysine, useful for stapling/stapled with another amino acid residue comprising a side chain acid group to form a staple through the 6-amino group
  SITE 11: note (S)-3-amino-1-((pent-4-en-1-yloxy)carbonyl)pyrrolidine-3-ca rboxylic acid, useful for stapling/stapled with another amino acid residue comprising an olefin group to form a staple through the olefin group
  SITE 12: note = (S)-2-amino-3-(2-(trifluoromethyl)phenyl)propanoic acid
  SITE 13: note = (S)-2-amino-3-(benzo[b]thiophen-3-yl)propanoic acid
  SITE 14: note = L-glutamic acid, useful for stapling/stapled with another amino acid residue comprising a side chain amino group to form a staple through the 4-carboxyl group
  SITE 15: note = C-term amino
XDXXDEXAFKXXXEA

SEQ ID NO: 156 - protein, 15 aa, synthetic construct
  SITE 1: note = N-term Acetic Acid
  SITE 1: note = (R)-2-allylpyrrolidine-2-carboxylic acid, useful for stapling/stapled with another amino acid residue comprising an olefin group to form a staple through the olefin group
  SITE 3: note = (S)-2-amino-4,4-dimethylpentanoic acid
  VARIANT 4: note = 2-amino-2-(pent-4-en-1-yl)hept-6-enoic acid, useful for stapling/stapled with another amino acid residue comprising an olefin group to form a staple through one of the two olefin groups and/or with another amino acid residue comprising an olefin group to form a staple through the other of the two olefin groups
  SITE 7: note = 2-amino-2-methylpropanoic acid
  SITE 10: note = L-lysine, useful for stapling/stapled with another amino acid residue comprising a side chain acid group to form a staple through the 6-amino group
  SITE 11: note (S)-3-amino-1-((pent-4-en-1-yloxy)carbonyl)pyrrolidine-3-ca rboxylic acid, useful for stapling/stapled with another amino acid residue comprising an olefin group to form a staple through the olefin group
  SITE 12: note = (S)-2-amino-3-(2-(trifluoromethyl)phenyl)propanoic acid
  SITE 13: note = (S)-2-amino-3-(benzo[b]thiophen-3-yl)propanoic acid
  SITE 14: note = L-glutamic acid, useful for stapling/stapled with another amino acid residue comprising a side chain amino group to form a staple through the 4-carboxyl group
  SITE 15: note = C-term amino
XDXXDDXAFKXXXEA

SEQ ID NO: 157 - protein, 15 aa, synthetic construct
  SITE 1: note = N-term Acetic Acid
  SITE 1: note = (R)-2-allylpyrrolidine-2-carboxylic acid, useful for stapling/stapled with another amino acid residue comprising an olefin group to form a staple through the olefin group
  SITE 3: note = (S)-2-amino-4,4-dimethylpentanoic acid
  VARIANT 4: note = 2-amino-2-(pent-4-en-1-yl)hept-6-enoic acid, useful for stapling/stapled with another amino acid residue comprising an olefin group to form a staple through one of the two olefin groups and/or with another amino acid residue comprising an olefin group to form a staple through the other of the two olefin groups
  SITE 7: note = 2-amino-2-methylpropanoic acid
  SITE 10: note = L-lysine, useful for stapling/stapled with another amino acid residue comprising a side chain acid group to form a staple through the 6-amino group
  SITE 11: note (S)-3-amino-1-((pent-4-en-1-yloxy)carbonyl)pyrrolidine-3-ca rboxylic acid, useful for stapling/stapled with another amino acid residue comprising an olefin group to form a staple through the olefin group
  SITE 12: note = (S)-2-amino-3-(2-(trifluoromethyl)phenyl)propanoic acid
  SITE 13: note = (S)-2-amino-3-(benzo[b]thiophen-3-yl)propanoic acid
  SITE 14: note = L-glutamic acid, useful for stapling/stapled with another amino acid residue comprising a side chain amino group to form a staple through the 4-carboxyl group
  SITE 15: note = C-term amino
XDXXDTXAFKXXXEA

SEQ ID NO: 158 - protein, 15 aa, synthetic construct
  SITE 1: note = N-term Acetic Acid
  SITE 1: note = (R)-2-allylpyrrolidine-2-carboxylic acid, useful for stapling/stapled with another amino acid residue comprising an olefin group to form a staple through the olefin group
  SITE 3: note = (S)-2-amino-4,4-dimethylpentanoic acid
  VARIANT 4: note = 2-amino-2-(pent-4-en-1-yl)hept-6-enoic acid, useful for stapling/stapled with another amino acid residue comprising an olefin group to form a staple through one of the two olefin groups and/or with another amino acid residue comprising an olefin group to form a staple through the other of the two olefin groups
  SITE 7: note = 2-amino-2-methylpropanoic acid
  SITE 10: note = L-lysine, useful for stapling/stapled with another amino acid residue comprising a side chain acid group to form a staple through the 6-amino group
  SITE 11: note (S)-3-amino-1-((pent-4-en-1-yloxy)carbonyl)pyrrolidine-3-ca rboxylic acid, useful for stapling/stapled with another amino acid residue comprising an olefin group to form a staple through the olefin group
  SITE 12: note = (S)-2-amino-3-(2-(trifluoromethyl)phenyl)propanoic acid
  SITE 13: note = (S)-2-amino-3-(benzo[b]thiophen-3-yl)propanoic acid
  SITE 14: note = L-glutamic acid, useful for stapling/stapled with another amino acid residue comprising a side chain amino group to form a staple through the 4-carboxyl group
  SITE 15: note = C-term amino
XDXXDQXAFKXXXEA

SEQ ID NO: 159 - protein, 15 aa, synthetic construct
  SITE 1: note = N-term Acetic Acid
  SITE 1: note = (R)-2-allylpyrrolidine-2-carboxylic acid, useful for stapling/stapled with another amino acid residue comprising an olefin group to form a staple through the olefin group
  SITE 3: note = (S)-2-amino-4,4-dimethylpentanoic acid
  VARIANT 4: note = 2-amino-2-(pent-4-en-1-yl)hept-6-enoic acid, useful for stapling/stapled with another amino acid residue comprising an olefin group to form a staple through one of the two olefin groups and/or with another amino acid residue comprising an olefin group to form a staple through the other of the two olefin groups
  SITE 7: note = 2-amino-2-methylpropanoic acid
  SITE 10: note = L-lysine, useful for stapling/stapled with another amino acid residue comprising a side chain acid group to form a staple through the 6-amino group
  SITE 11: note (S)-3-amino-1-((pent-4-en-1-yloxy)carbonyl)pyrrolidine-3-ca rboxylic acid, useful for stapling/stapled with another amino acid residue comprising an olefin group to form a staple through the olefin group
  SITE 12: note = (S)-2-amino-3-(2-(trifluoromethyl)phenyl)propanoic acid
  SITE 13: note = (S)-2-amino-3-(benzo[b]thiophen-3-yl)propanoic acid
  SITE 14: note = L-glutamic acid, useful for stapling/stapled with another amino acid residue comprising a side chain amino group to form a staple through the 4-carboxyl group
  SITE 15: note = C-term amino
XDXXDHXAFKXXXEA

SEQ ID NO: 160 - protein, 15 aa, synthetic construct
  SITE 1: note = N-term Acetic Acid
  SITE 1: note = (R)-2-allylpyrrolidine-2-carboxylic acid, useful for stapling/stapled with another amino acid residue comprising an olefin group to form a staple through the olefin group
  SITE 3: note = (S)-2-amino-4,4-dimethylpentanoic acid
  VARIANT 4: note = 2-amino-2-(pent-4-en-1-yl)hept-6-enoic acid, useful for stapling/stapled with another amino acid residue comprising an olefin group to form a staple through one of the two olefin groups and/or with another amino acid residue comprising an olefin group to form a staple through the other of the two olefin groups
  SITE 7: note = 2-amino-2-methylpropanoic acid
  SITE 10: note = L-lysine, useful for stapling/stapled with another amino acid residue comprising a side chain acid group to form a staple through the 6-amino group
  SITE 11: note (S)-3-amino-1-((pent-4-en-1-yloxy)carbonyl)pyrrolidine-3-ca rboxylic acid, useful for stapling/stapled with another amino acid residue comprising an olefin group to form a staple through the olefin group
  SITE 12: note = (S)-2-amino-3-(2-(trifluoromethyl)phenyl)propanoic acid
  SITE 13: note = (S)-2-amino-3-(benzo[b]thiophen-3-yl)propanoic acid
  SITE 14: note = L-glutamic acid, useful for stapling/stapled with another amino acid residue comprising a side chain amino group to form a staple through the 4-carboxyl group
  SITE 15: note = C-term amino
XDXXDYXAFKXXXEA

SEQ ID NO: 161 - protein, 15 aa, synthetic construct
  SITE 1: note = N-term Acetic Acid
  SITE 1: note = (R)-2-allylpyrrolidine-2-carboxylic acid, useful for stapling/stapled with another amino acid residue comprising an olefin group to form a staple through the olefin group
  SITE 3: note = (S)-2-amino-4,4-dimethylpentanoic acid
  VARIANT 4: note = 2-amino-2-(pent-4-en-1-yl)hept-6-enoic acid, useful for stapling/stapled with another amino acid residue comprising an olefin group to form a staple through one of the two olefin groups and/or with another amino acid residue comprising an olefin group to form a staple through the other of the two olefin groups
  SITE 6: note (S)-2-(2-amino-2-carboxyethyl)-4-(trifluoromethyl)benzoic acid
  SITE 7: note = 2-amino-2-methylpropanoic acid
  SITE 10: note = L-lysine, useful for stapling/stapled with another amino acid residue comprising a side chain acid group to form a staple through the 6-amino group
  SITE 11: note (S)-3-amino-1-((pent-4-en-1-yloxy)carbonyl)pyrrolidine-3-ca rboxylic acid, useful for stapling/stapled with another amino acid residue comprising an olefin group to form a staple through the olefin group
  SITE 12: note = (S)-2-amino-3-(2-(trifluoromethyl)phenyl)propanoic acid
  SITE 13: note = (S)-2-amino-3-(benzo[b]thiophen-3-yl)propanoic acid
  SITE 14: note = L-glutamic acid, useful for stapling/stapled with another amino acid residue comprising a side chain amino group to form a staple through the 4-carboxyl group
  SITE 15: note = C-term amino
XDXXDXXAFKXXXEA

SEQ ID NO: 162 - protein, 15 aa, synthetic construct
  SITE 1: note = N-term Acetic Acid
  SITE 1: note = (R)-2-allylpyrrolidine-2-carboxylic acid, useful for stapling/stapled with another amino acid residue comprising an olefin group to form a staple through the olefin group
  SITE 3: note = (S)-2-amino-4,4-dimethylpentanoic acid
  VARIANT 4: note = 2-amino-2-(pent-4-en-1-yl)hept-6-enoic acid, useful for stapling/stapled with another amino acid residue comprising an olefin group to form a staple through one of the two olefin groups and/or with another amino acid residue comprising an olefin group to form a staple through the other of the two olefin groups
  SITE 6: note (S)-2-(2-amino-2-carboxyethyl)-5-(trifluoromethyl)benzoic acid
  SITE 7: note = 2-amino-2-methylpropanoic acid
  SITE 10: note = L-lysine, useful for stapling/stapled with another amino acid residue comprising a side chain acid group to form a staple through the 6-amino group
  SITE 11: note (S)-3-amino-1-((pent-4-en-1-yloxy)carbonyl)pyrrolidine-3-ca rboxylic acid, useful for stapling/stapled with another amino acid residue comprising an olefin group to form a staple through the olefin group
  SITE 12: note = (S)-2-amino-3-(2-(trifluoromethyl)phenyl)propanoic acid
  SITE 13: note = (S)-2-amino-3-(benzo[b]thiophen-3-yl)propanoic acid
  SITE 14: note = L-glutamic acid, useful for stapling/stapled with another amino acid residue comprising a side chain amino group to form a staple through the 4-carboxyl group
  SITE 15: note = C-term amino
XDXXDXXAFKXXXEA

SEQ ID NO: 163 - protein, 15 aa, synthetic construct
  SITE 1: note = N-term Acetic Acid
  SITE 1: note = (R)-2-allylpyrrolidine-2-carboxylic acid, useful for stapling/stapled with another amino acid residue comprising an olefin group to form a staple through the olefin group
  SITE 3: note = (S)-2-amino-4,4-dimethylpentanoic acid
  VARIANT 4: note = 2-amino-2-(pent-4-en-1-yl)hept-6-enoic acid, useful for stapling/stapled with another amino acid residue comprising an olefin group to form a staple through one of the two olefin groups and/or with another amino acid residue comprising an olefin group to form a staple through the other of the two olefin groups
  SITE 6: note (S)-3-(2-amino-2-carboxyethyl)-5-(trifluoromethyl)benzoic acid
  SITE 7: note = 2-amino-2-methylpropanoic acid
  SITE 10: note = L-lysine, useful for stapling/stapled with another amino acid residue comprising a side chain acid group to form a staple through the 6-amino group
  SITE 11: note (S)-3-amino-1-((pent-4-en-1-yloxy)carbonyl)pyrrolidine-3-ca rboxylic acid, useful for stapling/stapled with another amino acid residue comprising an olefin group to form a staple through the olefin group
  SITE 12: note = (S)-2-amino-3-(2-(trifluoromethyl)phenyl)propanoic acid
  SITE 13: note = (S)-2-amino-3-(benzo[b]thiophen-3-yl)propanoic acid
  SITE 14: note = L-glutamic acid, useful for stapling/stapled with another amino acid residue comprising a side chain amino group to form a staple through the 4-carboxyl group
  SITE 15: note = C-term amino
XDXXDXXAFKXXXEA

SEQ ID NO: 164 - protein, 15 aa, synthetic construct
  SITE 1: note = N-term Acetic Acid
  SITE 1: note = (R)-2-allylpyrrolidine-2-carboxylic acid, useful for stapling/stapled with another amino acid residue comprising an olefin group to form a staple through the olefin group
  SITE 3: note = (S)-2-amino-4,4-dimethylpentanoic acid
  VARIANT 4: note = 2-amino-2-(pent-4-en-1-yl)hept-6-enoic acid, useful for stapling/stapled with another amino acid residue comprising an olefin group to form a staple through one of the two olefin groups and/or with another amino acid residue comprising an olefin group to form a staple through the other of the two olefin groups
  SITE 6: note (S)-5-(2-amino-2-carboxyethyl)-2-(trifluoromethyl)benzoic acid
  SITE 7: note = 2-amino-2-methylpropanoic acid
  SITE 10: note = L-lysine, useful for stapling/stapled with another amino acid residue comprising a side chain acid group to form a staple through the 6-amino group
  SITE 11: note (S)-3-amino-1-((pent-4-en-1-yloxy)carbonyl)pyrrolidine-3-ca rboxylic acid, useful for stapling/stapled with another amino acid residue comprising an olefin group to form a staple through the olefin group
  SITE 12: note = (S)-2-amino-3-(2-(trifluoromethyl)phenyl)propanoic acid
  SITE 13: note = (S)-2-amino-3-(benzo[b]thiophen-3-yl)propanoic acid
  SITE 14: note = L-glutamic acid, useful for stapling/stapled with another amino acid residue comprising a side chain amino group to form a staple through the 4-carboxyl group
  SITE 15: note = C-term amino
XDXXDXXAFKXXXEA

SEQ ID NO: 165 - protein, 15 aa, synthetic construct
  SITE 1: note = N-term Acetic Acid
  SITE 1: note = (R)-2-allylpyrrolidine-2-carboxylic acid, useful for stapling/stapled with another amino acid residue comprising an olefin group to form a staple through the olefin group
  SITE 3: note = (S)-2-amino-4,4-dimethylpentanoic acid
  VARIANT 4: note = 2-amino-2-(pent-4-en-1-yl)hept-6-enoic acid, useful for stapling/stapled with another amino acid residue comprising an olefin group to form a staple through one of the two olefin groups and/or with another amino acid residue comprising an olefin group to form a staple through the other of the two olefin groups
  SITE 6: note = (S)-2-(2-amino-2-carboxyethyl)-6-fluorobenzoic acid
  SITE 7: note = 2-amino-2-methylpropanoic acid
  SITE 10: note = L-lysine, useful for stapling/stapled with another amino acid residue comprising a side chain acid group to form a staple through the 6-amino group
  SITE 11: note (S)-3-amino-1-((pent-4-en-1-yloxy)carbonyl)pyrrolidine-3-ca rboxylic acid, useful for stapling/stapled with another amino acid residue comprising an olefin group to form a staple through the olefin group
  SITE 12: note = (S)-2-amino-3-(2-(trifluoromethyl)phenyl)propanoic acid
  SITE 13: note = (S)-2-amino-3-(benzo[b]thiophen-3-yl)propanoic acid
  SITE 14: note = L-glutamic acid, useful for stapling/stapled with another amino acid residue comprising a side chain amino group to form a staple through the 4-carboxyl group
  SITE 15: note = C-term amino
XDXXDXXAFKXXXEA

SEQ ID NO: 166 - protein, 15 aa, synthetic construct
  SITE 1: note = N-term Acetic Acid
  SITE 1: note = (R)-2-allylpyrrolidine-2-carboxylic acid, useful for stapling/stapled with another amino acid residue comprising an olefin group to form a staple through the olefin group
  SITE 3: note = (S)-2-amino-4,4-dimethylpentanoic acid
  VARIANT 4: note = 2-amino-2-(pent-4-en-1-yl)hept-6-enoic acid, useful for stapling/stapled with another amino acid residue comprising an olefin group to form a staple through one of the two olefin groups and/or with another amino acid residue comprising an olefin group to form a staple through the other of the two olefin groups
  SITE 7: note = 2-amino-2-methylpropanoic acid
  SITE 10: note = L-lysine, useful for stapling/stapled with another amino acid residue comprising a side chain acid group to form a staple through the 6-amino group
  SITE 11: note (S)-3-amino-1-((pent-4-en-1-yloxy)carbonyl)pyrrolidine-3-ca rboxylic acid, useful for stapling/stapled with another amino acid residue comprising an olefin group to form a staple through the olefin group
  SITE 12: note = (S)-2-amino-3-(2-(trifluoromethyl)phenyl)propanoic acid
  SITE 13: note = (S)-2-amino-3-(benzo[b]thiophen-3-yl)propanoic acid
  SITE 14: note = L-glutamic acid, useful for stapling/stapled with another amino acid residue comprising a side chain amino group to form a staple through the 4-carboxyl group
  SITE 15: note = C-term amino
XDXXDVXAFKXXXEA

SEQ ID NO: 167 - protein, 15 aa, synthetic construct
  SITE 1: note = N-term Acetic Acid
  SITE 1: note = (R)-2-allylpyrrolidine-2-carboxylic acid, useful for stapling/stapled with another amino acid residue comprising an olefin group to form a staple through the olefin group
  SITE 3: note = (S)-2-amino-4,4-dimethylpentanoic acid
  VARIANT 4: note = 2-amino-2-(pent-4-en-1-yl)hept-6-enoic acid, useful for stapling/stapled with another amino acid residue comprising an olefin group to form a staple through one of the two olefin groups and/or with another amino acid residue comprising an olefin group to form a staple through the other of the two olefin groups
  SITE 7: note = 2-amino-2-methylpropanoic acid
  SITE 10: note = L-lysine, useful for stapling/stapled with another amino acid residue comprising a side chain acid group to form a staple through the 6-amino group
  SITE 11: note (S)-3-amino-1-((pent-4-en-1-yloxy)carbonyl)pyrrolidine-3-ca rboxylic acid, useful for stapling/stapled with another amino acid residue comprising an olefin group to form a staple through the olefin group
  SITE 12: note = (S)-2-amino-3-(2-(trifluoromethyl)phenyl)propanoic acid
  SITE 13: note = (S)-2-amino-3-(benzo[b]thiophen-3-yl)propanoic acid
  SITE 14: note = L-glutamic acid, useful for stapling/stapled with another amino acid residue comprising a side chain amino group to form a staple through the 4-carboxyl group
  SITE 15: note = C-term amino
XDXXDSXAFKXXXEA

SEQ ID NO: 168 - protein, 15 aa, synthetic construct
  SITE 1: note = N-term Acetic Acid
  SITE 1: note = (R)-2-allylpyrrolidine-2-carboxylic acid, useful for stapling/stapled with another amino acid residue comprising an olefin group to form a staple through the olefin group
  SITE 3: note = (S)-2-amino-4,4-dimethylpentanoic acid
  VARIANT 4: note = 2-amino-2-(pent-4-en-1-yl)hept-6-enoic acid, useful for stapling/stapled with another amino acid residue comprising an olefin group to form a staple through one of the two olefin groups and/or with another amino acid residue comprising an olefin group to form a staple through the other of the two olefin groups
  SITE 7: note = 2-amino-2-methylpropanoic acid
  SITE 10: note = L-lysine, useful for stapling/stapled with another amino acid residue comprising a side chain acid group to form a staple through the 6-amino group
  SITE 11: note (S)-3-amino-1-((pent-4-en-1-yloxy)carbonyl)pyrrolidine-3-ca rboxylic acid, useful for stapling/stapled with another amino acid residue comprising an olefin group to form a staple through the olefin group
  SITE 12: note = (S)-2-amino-3-(2-(trifluoromethyl)phenyl)propanoic acid
  SITE 13: note = (S)-2-amino-3-(benzo[b]thiophen-3-yl)propanoic acid
  SITE 14: note = L-glutamic acid, useful for stapling/stapled with another amino acid residue comprising a side chain amino group to form a staple through the 4-carboxyl group
  SITE 15: note = C-term amino
XDXXDWXAFKXXXEA

SEQ ID NO: 169 - protein, 15 aa, synthetic construct
  SITE 1: note = N-term Acetic Acid
  SITE 1: note = (R)-2-allylpyrrolidine-2-carboxylic acid, useful for stapling/stapled with another amino acid residue comprising an olefin group to form a staple through the olefin group
  SITE 3: note = (S)-2-amino-4,4-dimethylpentanoic acid
  VARIANT 4: note = 2-amino-2-(pent-4-en-1-yl)hept-6-enoic acid, useful for stapling/stapled with another amino acid residue comprising an olefin group to form a staple through one of the two olefin groups and/or with another amino acid residue comprising an olefin group to form a staple through the other of the two olefin groups
  SITE 7: note = 2-amino-2-methylpropanoic acid
  SITE 10: note = L-lysine, useful for stapling/stapled with another amino acid residue comprising a side chain acid group to form a staple through the 6-amino group
  SITE 11: note (S)-3-amino-1-((pent-4-en-1-yloxy)carbonyl)pyrrolidine-3-ca rboxylic acid, useful for stapling/stapled with another amino acid residue comprising an olefin group to form a staple through the olefin group
  SITE 12: note = (S)-2-amino-3-(2-(trifluoromethyl)phenyl)propanoic acid
  SITE 13: note = (S)-2-amino-3-(benzo[b]thiophen-3-yl)propanoic acid
  SITE 14: note = L-glutamic acid, useful for stapling/stapled with another amino acid residue comprising a side chain amino group to form a staple through the 4-carboxyl group
  SITE 15: note = C-term amino
XDXXDNXAFKXXXEA

SEQ ID NO: 170 - protein, 15 aa, synthetic construct
  SITE 1: note = N-term Acetic Acid
  SITE 1: note = (R)-2-allylpyrrolidine-2-carboxylic acid, useful for stapling/stapled with another amino acid residue comprising an olefin group to form a staple through the olefin group
  SITE 3: note = (S)-2-amino-4,4-dimethylpentanoic acid
  VARIANT 4: note = 2-amino-2-(pent-4-en-1-yl)hept-6-enoic acid, useful for stapling/stapled with another amino acid residue comprising an olefin group to form a staple through one of the two olefin groups and/or with another amino acid residue comprising an olefin group to form a staple through the other of the two olefin groups
  SITE 7: note = 2-amino-2-methylpropanoic acid
  SITE 10: note = L-lysine, useful for stapling/stapled with another amino acid residue comprising a side chain acid group to form a staple through the 6-amino group
  SITE 11: note (S)-3-amino-1-((pent-4-en-1-yloxy)carbonyl)pyrrolidine-3-ca rboxylic acid, useful for stapling/stapled with another amino acid residue comprising an olefin group to form a staple through the olefin group
  SITE 12: note = (S)-2-amino-3-(2-(trifluoromethyl)phenyl)propanoic acid
  SITE 13: note = (S)-2-amino-3-(benzo[b]thiophen-3-yl)propanoic acid
  SITE 14: note = L-glutamic acid, useful for stapling/stapled with another amino acid residue comprising a side chain amino group to form a staple through the 4-carboxyl group
  SITE 15: note = C-term amino
XDXXDAXAFKXXXEA

SEQ ID NO: 171 - protein, 15 aa, synthetic construct
  SITE 1: note = N-term Acetic Acid
  SITE 1: note = (R)-2-allylpyrrolidine-2-carboxylic acid, useful for stapling/stapled with another amino acid residue comprising an olefin group to form a staple through the olefin group
  SITE 3: note = (S)-2-amino-4,4-dimethylpentanoic acid
  VARIANT 4: note = 2-amino-2-(pent-4-en-1-yl)hept-6-enoic acid, useful for stapling/stapled with another amino acid residue comprising an olefin group to form a staple through one of the two olefin groups and/or with another amino acid residue comprising an olefin group to form a staple through the other of the two olefin groups
  SITE 7: note = 2-amino-2-methylpropanoic acid
  SITE 10: note = L-lysine, useful for stapling/stapled with another amino acid residue comprising a side chain acid group to form a staple through the 6-amino group
  SITE 11: note (S)-3-amino-1-((pent-4-en-1-yloxy)carbonyl)pyrrolidine-3-ca rboxylic acid, useful for stapling/stapled with another amino acid residue comprising an olefin group to form a staple through the olefin group
  SITE 12: note = (S)-2-amino-3-(2-(trifluoromethyl)phenyl)propanoic acid
  SITE 13: note = (S)-2-amino-3-(benzo[b]thiophen-3-yl)propanoic acid
  SITE 14: note = L-glutamic acid, useful for stapling/stapled with another amino acid residue comprising a side chain amino group to form a staple through the 4-carboxyl group
  SITE 15: note = C-term amino
XDXXDRXAFKXXXEA

SEQ ID NO: 172 - protein, 15 aa, synthetic construct
  SITE 1: note = N-term Acetic Acid
  SITE 1: note = (R)-2-allylpyrrolidine-2-carboxylic acid, useful for stapling/stapled with another amino acid residue comprising an olefin group to form a staple through the olefin group
  SITE 3: note = (S)-2-amino-4,4-dimethylpentanoic acid
  VARIANT 4: note = 2-amino-2-(pent-4-en-1-yl)hept-6-enoic acid, useful for stapling/stapled with another amino acid residue comprising an olefin group to form a staple through one of the two olefin groups and/or with another amino acid residue comprising an olefin group to form a staple through the other of the two olefin groups
  SITE 6: note = D-glutamic acid
  SITE 7: note = 2-amino-2-methylpropanoic acid
  SITE 10: note = L-lysine, useful for stapling/stapled with another amino acid residue comprising a side chain acid group to form a staple through the 6-amino group
  SITE 11: note (S)-3-amino-1-((pent-4-en-1-yloxy)carbonyl)pyrrolidine-3-ca rboxylic acid, useful for stapling/stapled with another amino acid residue comprising an olefin group to form a staple through the olefin group
  SITE 12: note = (S)-2-amino-3-(2-(trifluoromethyl)phenyl)propanoic acid
  SITE 13: note = (S)-2-amino-3-(benzo[b]thiophen-3-yl)propanoic acid
  SITE 14: note = L-glutamic acid, useful for stapling/stapled with another amino acid residue comprising a side chain amino group to form a staple through the 4-carboxyl group
  SITE 15: note = C-term amino
XDXXDEXAFKXXXEA

SEQ ID NO: 173 - protein, 15 aa, synthetic construct
  SITE 1: note = N-term Acetic Acid
  SITE 1: note = (R)-2-allylpyrrolidine-2-carboxylic acid, useful for stapling/stapled with another amino acid residue comprising an olefin group to form a staple through the olefin group
  SITE 3: note = (S)-2-amino-4,4-dimethylpentanoic acid
  VARIANT 4: note = 2-amino-2-(pent-4-en-1-yl)hept-6-enoic acid, useful for stapling/stapled with another amino acid residue comprising an olefin group to form a staple through one of the two olefin groups and/or with another amino acid residue comprising an olefin group to form a staple through the other of the two olefin groups
  SITE 6: note = L-allothreonine
  SITE 7: note = 2-amino-2-methylpropanoic acid
  SITE 10: note = L-lysine, useful for stapling/stapled with another amino acid residue comprising a side chain acid group to form a staple through the 6-amino group
  SITE 11: note (S)-3-amino-1-((pent-4-en-1-yloxy)carbonyl)pyrrolidine-3-ca rboxylic acid, useful for stapling/stapled with another amino acid residue comprising an olefin group to form a staple through the olefin group
  SITE 12: note = (S)-2-amino-3-(2-(trifluoromethyl)phenyl)propanoic acid
  SITE 13: note = (S)-2-amino-3-(benzo[b]thiophen-3-yl)propanoic acid
  SITE 14: note = L-glutamic acid, useful for stapling/stapled with another amino acid residue comprising a side chain amino group to form a staple through the 4-carboxyl group
  SITE 15: note = C-term amino
XDXXDTXAFKXXXEA

SEQ ID NO: 174 - protein, 15 aa, synthetic construct
  SITE 1: note = N-term Acetic Acid
  SITE 1: note = (R)-2-allylpyrrolidine-2-carboxylic acid, useful for stapling/stapled with another amino acid residue comprising an olefin group to form a staple through the olefin group
  SITE 3: note = (S)-2-amino-4,4-dimethylpentanoic acid
  VARIANT 4: note = 2-amino-2-(pent-4-en-1-yl)hept-6-enoic acid, useful for stapling/stapled with another amino acid residue comprising an olefin group to form a staple through one of the two olefin groups and/or with another amino acid residue comprising an olefin group to form a staple through the other of the two olefin groups
  SITE 6: note = (S)-2-amino-4-(4-hydroxyphenyl)butanoic acid
  SITE 7: note = 2-amino-2-methylpropanoic acid
  SITE 10: note = L-lysine, useful for stapling/stapled with another amino acid residue comprising a side chain acid group to form a staple through the 6-amino group
  SITE 11: note (S)-3-amino-1-((pent-4-en-1-yloxy)carbonyl)pyrrolidine-3-ca rboxylic acid, useful for stapling/stapled with another amino acid residue comprising an olefin group to form a staple through the olefin group
  SITE 12: note = (S)-2-amino-3-(2-(trifluoromethyl)phenyl)propanoic acid
  SITE 13: note = (S)-2-amino-3-(benzo[b]thiophen-3-yl)propanoic acid
  SITE 14: note = L-glutamic acid, useful for stapling/stapled with another amino acid residue comprising a side chain amino group to form a staple through the 4-carboxyl group
  SITE 15: note = C-term amino
XDXXDXXAFKXXXEA

SEQ ID NO: 175 - protein, 15 aa, synthetic construct
  SITE 1: note = N-term Acetic Acid
  SITE 1: note = (R)-2-allylpyrrolidine-2-carboxylic acid, useful for stapling/stapled with another amino acid residue comprising an olefin group to form a staple through the olefin group
  SITE 3: note = (S)-2-amino-4,4-dimethylpentanoic acid
  VARIANT 4: note = 2-amino-2-(pent-4-en-1-yl)hept-6-enoic acid, useful for stapling/stapled with another amino acid residue comprising an olefin group to form a staple through one of the two olefin groups and/or with another amino acid residue comprising an olefin group to form a staple through the other of the two olefin groups
  SITE 6: note = (S)-2-amino-3-(3-carbamoylphenyl)propanoic acid
  SITE 7: note = 2-amino-2-methylpropanoic acid
  SITE 10: note = L-lysine, useful for stapling/stapled with another amino acid residue comprising a side chain acid group to form a staple through the 6-amino group
  SITE 11: note (S)-3-amino-1-((pent-4-en-1-yloxy)carbonyl)pyrrolidine-3-ca rboxylic acid, useful for stapling/stapled with another amino acid residue comprising an olefin group to form a staple through the olefin group
  SITE 12: note = (S)-2-amino-3-(2-(trifluoromethyl)phenyl)propanoic acid
  SITE 13: note = (S)-2-amino-3-(benzo[b]thiophen-3-yl)propanoic acid
  SITE 14: note = L-glutamic acid, useful for stapling/stapled with another amino acid residue comprising a side chain amino group to form a staple through the 4-carboxyl group
  SITE 15: note = C-term amino
XDXXDXXAFKXXXEA

SEQ ID NO: 176 - protein, 15 aa, synthetic construct
  SITE 1: note = N-term Acetic Acid
  SITE 1: note = (R)-2-allylpyrrolidine-2-carboxylic acid, useful for stapling/stapled with another amino acid residue comprising an olefin group to form a staple through the olefin group
  SITE 3: note = (S)-2-amino-4,4-dimethylpentanoic acid
  VARIANT 4: note = 2-amino-2-(pent-4-en-1-yl)hept-6-enoic acid, useful for stapling/stapled with another amino acid residue comprising an olefin group to form a staple through one of the two olefin groups and/or with another amino acid residue comprising an olefin group to form a staple through the other of the two olefin groups
  SITE 7: note = 2-amino-2-methylpropanoic acid
  SITE 10: note = L-lysine, useful for stapling/stapled with another amino acid residue comprising a side chain acid group to form a staple through the 6-amino group
  SITE 11: note (S)-3-amino-1-((pent-4-en-1-yloxy)carbonyl)pyrrolidine-3-ca rboxylic acid, useful for stapling/stapled with another amino acid residue comprising an olefin group to form a staple through the olefin group
  SITE 12: note = (S)-2-amino-3-(2-(trifluoromethyl)phenyl)propanoic acid
  SITE 13: note = (S)-2-amino-3-(benzo[b]thiophen-3-yl)propanoic acid
  SITE 14: note = L-glutamic acid, useful for stapling/stapled with another amino acid residue comprising a side chain amino group to form a staple through the 4-carboxyl group
  SITE 15: note = C-term amino
XDXXDLXAFKXXXEA

SEQ ID NO: 177 - protein, 15 aa, synthetic construct
  SITE 1: note = N-term Acetic Acid
  SITE 1: note = (R)-2-allylpyrrolidine-2-carboxylic acid, useful for stapling/stapled with another amino acid residue comprising an olefin group to form a staple through the olefin group
  SITE 3: note = (S)-2-amino-4,4-dimethylpentanoic acid
  VARIANT 4: note = 2-amino-2-(pent-4-en-1-yl)hept-6-enoic acid, useful for stapling/stapled with another amino acid residue comprising an olefin group to form a staple through one of the two olefin groups and/or with another amino acid residue comprising an olefin group to form a staple through the other of the two olefin groups
  SITE 7: note = 2-amino-2-methylpropanoic acid
  SITE 10: note = L-lysine, useful for stapling/stapled with another amino acid residue comprising a side chain acid group to form a staple through the 6-amino group
  SITE 11: note (S)-3-amino-1-((pent-4-en-1-yloxy)carbonyl)pyrrolidine-3-ca rboxylic acid, useful for stapling/stapled with another amino acid residue comprising an olefin group to form a staple through the olefin group
  SITE 12: note = (S)-2-amino-3-(2-(trifluoromethyl)phenyl)propanoic acid
  SITE 13: note = (S)-2-amino-3-(benzo[b]thiophen-3-yl)propanoic acid
  SITE 14: note = L-glutamic acid, useful for stapling/stapled with another amino acid residue comprising a side chain amino group to form a staple through the 4-carboxyl group
  SITE 15: note = C-term amino
XDXXDFXAFKXXXEA

SEQ ID NO: 178 - protein, 15 aa, synthetic construct
  SITE 1: note = N-term Acetic Acid
  SITE 1: note = (R)-2-allylpyrrolidine-2-carboxylic acid, useful for stapling/stapled with another amino acid residue comprising an olefin group to form a staple through the olefin group
  SITE 3: note = (S)-2-amino-4,4-dimethylpentanoic acid
  VARIANT 4: note = 2-amino-2-(pent-4-en-1-yl)hept-6-enoic acid, useful for stapling/stapled with another amino acid residue comprising an olefin group to form a staple through one of the two olefin groups and/or with another amino acid residue comprising an olefin group to form a staple through the other of the two olefin groups
  SITE 7: note = 2-amino-2-methylpropanoic acid
  SITE 10: note = L-lysine, useful for stapling/stapled with another amino acid residue comprising a side chain acid group to form a staple through the 6-amino group
  SITE 11: note (S)-3-amino-1-((pent-4-en-1-yloxy)carbonyl)pyrrolidine-3-ca rboxylic acid, useful for stapling/stapled with another amino acid residue comprising an olefin group to form a staple through the olefin group
  SITE 12: note = (S)-2-amino-3-(2-(trifluoromethyl)phenyl)propanoic acid
  SITE 13: note = (S)-2-amino-3-(benzo[b]thiophen-3-yl)propanoic acid
  SITE 14: note = L-glutamic acid, useful for stapling/stapled with another amino acid residue comprising a side chain amino group to form a staple through the 4-carboxyl group
  SITE 15: note = C-term amino
XDXXDKXAFKXXXEA

SEQ ID NO: 179 - protein, 15 aa, synthetic construct
  SITE 1: note = N-term Acetic Acid
  SITE 1: note = (R)-2-allylpyrrolidine-2-carboxylic acid, useful for stapling/stapled with another amino acid residue comprising an olefin group to form a staple through the olefin group
  SITE 3: note = (S)-2-amino-4,4-dimethylpentanoic acid
  VARIANT 4: note = 2-amino-2-(pent-4-en-1-yl)hept-6-enoic acid, useful for stapling/stapled with another amino acid residue comprising an olefin group to form a staple through one of the two olefin groups and/or with another amino acid residue comprising an olefin group to form a staple through the other of the two olefin groups
  SITE 7: note = 2-amino-2-methylpropanoic acid
  SITE 10: note = L-lysine, useful for stapling/stapled with another amino acid residue comprising a side chain acid group to form a staple through the 6-amino group
  SITE 11: note (S)-3-amino-1-((pent-4-en-1-yloxy)carbonyl)pyrrolidine-3-ca rboxylic acid, useful for stapling/stapled with another amino acid residue comprising an olefin group to form a staple through the olefin group
  SITE 12: note = (S)-2-amino-3-(2-(trifluoromethyl)phenyl)propanoic acid
  SITE 13: note = (S)-2-amino-3-(benzo[b]thiophen-3-yl)propanoic acid
  SITE 14: note = L-glutamic acid, useful for stapling/stapled with another amino acid residue comprising a side chain amino group to form a staple through the 4-carboxyl group
  SITE 15: note = C-term amino
XDXXDIXAFKXXXEA

SEQ ID NO: 180 - protein, 16 aa, synthetic construct
  SITE 1: note = N-term Acetic Acid
  SITE 1: note = (R)-2-allylpyrrolidine-2-carboxylic acid, useful for stapling/stapled with another amino acid residue comprising an olefin group to form a staple through the olefin group
  SITE 3: note = (S)-2-amino-4,4-dimethylpentanoic acid
  VARIANT 4: note = 2-amino-2-(pent-4-en-1-yl)hept-6-enoic acid, useful for stapling/stapled with another amino acid residue comprising an olefin group to form a staple through one of the two olefin groups and/or with another amino acid residue comprising an olefin group to form a staple through the other of the two olefin groups
  SITE 6: note = (S)-3-(2-amino-2-carboxyethyl)benzoic acid
  SITE 7: note = 2-amino-2-methylpropanoic acid
  SITE 10: note = L-lysine, useful for stapling/stapled with another amino acid residue comprising a side chain acid group to form a staple through the 6-amino group
  SITE 11: note (S)-3-amino-1-((pent-4-en-1-yloxy)carbonyl)pyrrolidine-3-ca rboxylic acid, useful for stapling/stapled with another amino acid residue comprising an olefin group to form a staple through the olefin group
  SITE 12: note = (S)-2-amino-3-(2-(trifluoromethyl)phenyl)propanoic acid
  SITE 13: note = (S)-2-amino-3-(benzo[b]thiophen-3-yl)propanoic acid
  SITE 14: note = L-glutamic acid, useful for stapling/stapled with another amino acid residue comprising a side chain amino group to form a staple through the 4-carboxyl group
  SITE 16: note = 2-aminopropane-1,3-diol
  SITE 16: note = C-term 2-aminopropane-1,3-diol
XDXXDXXAFKXXXEAX

SEQ ID NO: 181 - protein, 16 aa, synthetic construct
  SITE 1: note = N-term Acetic Acid
  SITE 1: note = (R)-2-allylpyrrolidine-2-carboxylic acid, useful for stapling/stapled with another amino acid residue comprising an olefin group to form a staple through the olefin group
  SITE 3: note = (S)-2-amino-4,4-dimethylpentanoic acid
  VARIANT 4: note = 2-amino-2-(pent-4-en-1-yl)hept-6-enoic acid, useful for stapling/stapled with another amino acid residue comprising an olefin group to form a staple through one of the two olefin groups and/or with another amino acid residue comprising an olefin group to form a staple through the other of the two olefin groups
  SITE 6: note = (S)-3-(2-amino-2-carboxyethyl)benzoic acid
  SITE 7: note = 2-amino-2-methylpropanoic acid
  SITE 10: note = L-lysine, useful for stapling/stapled with another amino acid residue comprising a side chain acid group to form a staple through the 6-amino group
  SITE 11: note (S)-3-amino-1-((pent-4-en-1-yloxy)carbonyl)pyrrolidine-3-ca rboxylic acid, useful for stapling/stapled with another amino acid residue comprising an olefin group to form a staple through the olefin group
  SITE 12: note = (S)-2-amino-3-(2-(trifluoromethyl)phenyl)propanoic acid
  SITE 13: note = (S)-2-amino-3-(benzo[b]thiophen-3-yl)propanoic acid
  SITE 14: note = L-glutamic acid, useful for stapling/stapled with another amino acid residue comprising a side chain amino group to form a staple through the 4-carboxyl group
  SITE 15: note = (S)-2-amino-5-morpholinopentanoic acid
  SITE 16: note = 2-aminopropane-1,3-diol
  SITE 16: note = C-term 2-aminopropane-1,3-diol
XDXXDXXAFKXXXEXX

SEQ ID NO: 182 - protein, 16 aa, synthetic construct
  SITE 1: note = N-term Acetic Acid
  SITE 1: note = (R)-2-allylpyrrolidine-2-carboxylic acid, useful for stapling/stapled with another amino acid residue comprising an olefin group to form a staple through the olefin group
  SITE 3: note = (S)-2-amino-4,4-dimethylpentanoic acid
  VARIANT 4: note = 2-amino-2-(pent-4-en-1-yl)hept-6-enoic acid, useful for stapling/stapled with another amino acid residue comprising an olefin group to form a staple through one of the two olefin groups and/or with another amino acid residue comprising an olefin group to form a staple through the other of the two olefin groups
  SITE 6: note = (S)-3-(2-amino-2-carboxyethyl)benzoic acid
  SITE 7: note = 2-amino-2-methylpropanoic acid
  SITE 10: note = L-lysine, useful for stapling/stapled with another amino acid residue comprising a side chain acid group to form a staple through the 6-amino group
  SITE 11: note (S)-3-amino-1-((pent-4-en-1-yloxy)carbonyl)pyrrolidine-3-ca rboxylic acid, useful for stapling/stapled with another amino acid residue comprising an olefin group to form a staple through the olefin group
  SITE 12: note = (S)-2-amino-3-(2-(trifluoromethyl)phenyl)propanoic acid
  SITE 13: note = (S)-2-amino-3-(benzo[b]thiophen-3-yl)propanoic acid
  SITE 14: note = L-glutamic acid, useful for stapling/stapled with another amino acid residue comprising a side chain amino group to form a staple through the 4-carboxyl group
  SITE 15: note = (S)-2-amino-5-morpholinopentanoic acid
  SITE 16: note = (R)-2-aminopropan-1-ol
  SITE 16: note = C-term (R)-2-aminopropan-1-ol
XDXXDXXAFKXXXEXX

SEQ ID NO: 183 - protein, 15 aa, synthetic construct
  SITE 1: note = N-term Acetic Acid
  SITE 1: note = (R)-2-allylpyrrolidine-2-carboxylic acid, useful for stapling/stapled with another amino acid residue comprising an olefin group to form a staple through the olefin group
  SITE 3: note = (S)-2-amino-4,4-dimethylpentanoic acid
  VARIANT 4: note = 2-amino-2-(pent-4-en-1-yl)hept-6-enoic acid, useful for stapling/stapled with another amino acid residue comprising an olefin group to form a staple through one of the two olefin groups and/or with another amino acid residue comprising an olefin group to form a staple through the other of the two olefin groups
  SITE 6: note = (S)-3-(2-amino-2-carboxyethyl)benzoic acid
  SITE 7: note = 2-amino-2-methylpropanoic acid
  SITE 10: note = L-lysine, useful for stapling/stapled with another amino acid residue comprising a side chain acid group to form a staple through the 6-amino group
  SITE 11: note (S)-3-amino-1-((pent-4-en-1-yloxy)carbonyl)pyrrolidine-3-ca rboxylic acid, useful for stapling/stapled with another amino acid residue comprising an olefin group to form a staple through the olefin group
  SITE 12: note = (S)-2-amino-3-(2-(trifluoromethyl)phenyl)propanoic acid
  SITE 13: note = (S)-2-amino-3-(benzo[b]thiophen-3-yl)propanoic acid
  SITE 14: note = L-glutamic acid, useful for stapling/stapled with another amino acid residue comprising a side chain amino group to form a staple through the 4-carboxyl group
  SITE 15: note = C-term ethanamine
XDXXDXXAFKXXXEA

SEQ ID NO: 184 - protein, 16 aa, synthetic construct
  SITE 1: note = N-term Acetic Acid
  SITE 1: note = (R)-2-allylpyrrolidine-2-carboxylic acid, useful for stapling/stapled with another amino acid residue comprising an olefin group to form a staple through the olefin group
  SITE 3: note = (S)-2-amino-4,4-dimethylpentanoic acid
  VARIANT 4: note = 2-amino-2-(pent-4-en-1-yl)hept-6-enoic acid, useful for stapling/stapled with another amino acid residue comprising an olefin group to form a staple through one of the two olefin groups and/or with another amino acid residue comprising an olefin group to form a staple through the other of the two olefin groups
  SITE 6: note = (S)-3-(2-amino-2-carboxyethyl)benzoic acid
  SITE 7: note = 2-amino-2-methylpropanoic acid
  SITE 10: note = L-lysine, useful for stapling/stapled with another amino acid residue comprising a side chain acid group to form a staple through the 6-amino group
  SITE 11: note (S)-3-amino-1-((pent-4-en-1-yloxy)carbonyl)pyrrolidine-3-ca rboxylic acid, useful for stapling/stapled with another amino acid residue comprising an olefin group to form a staple through the olefin group
  SITE 12: note = (S)-2-amino-3-(2-(trifluoromethyl)phenyl)propanoic acid
  SITE 13: note = (S)-2-amino-3-(benzo[b]thiophen-3-yl)propanoic acid
  SITE 14: note = L-glutamic acid, useful for stapling/stapled with another amino acid residue comprising a side chain amino group to form a staple through the 4-carboxyl group
  SITE 16: note = C-term ethanamine
XDXXDXXAFKXXXEAS

SEQ ID NO: 185 - protein, 15 aa, synthetic construct
  SITE 1: note = N-term Acetic Acid
  SITE 1: note = (R)-2-allylpyrrolidine-2-carboxylic acid, useful for stapling/stapled with another amino acid residue comprising an olefin group to form a staple through the olefin group
  SITE 3: note = (S)-2-amino-4,4-dimethylpentanoic acid
  VARIANT 4: note = 2-amino-2-(pent-4-en-1-yl)hept-6-enoic acid, useful for stapling/stapled with another amino acid residue comprising an olefin group to form a staple through one of the two olefin groups and/or with another amino acid residue comprising an olefin group to form a staple through the other of the two olefin groups
  SITE 6: note = (S)-3-(2-amino-2-carboxyethyl)benzoic acid
  SITE 7: note = 2-amino-2-methylpropanoic acid
  SITE 10: note = L-lysine, useful for stapling/stapled with another amino acid residue comprising a side chain acid group to form a staple through the 6-amino group
  SITE 11: note (S)-3-amino-1-((pent-4-en-1-yloxy)carbonyl)pyrrolidine-3-ca rboxylic acid, useful for stapling/stapled with another amino acid residue comprising an olefin group to form a staple through the olefin group
  SITE 12: note = (S)-2-amino-3-(2-(trifluoromethyl)phenyl)propanoic acid
  SITE 13: note = (S)-2-amino-3-(benzo[b]thiophen-3-yl)propanoic acid
  SITE 14: note = L-glutamic acid, useful for stapling/stapled with another amino acid residue comprising a side chain amino group to form a staple through the 4-carboxyl group
  SITE 15: note = (S)-2-amino-5-morpholinopentanoic acid
  SITE 15: note = C-term ethanamine
XDXXDXXAFKXXXEX

SEQ ID NO: 186 - protein, 16 aa, synthetic construct
  SITE 1: note = N-term Acetic Acid
  SITE 1: note = (R)-2-allylpyrrolidine-2-carboxylic acid, useful for stapling/stapled with another amino acid residue comprising an olefin group to form a staple through the olefin group
  SITE 3: note = (S)-2-amino-4,4-dimethylpentanoic acid
  VARIANT 4: note = 2-amino-2-(pent-4-en-1-yl)hept-6-enoic acid, useful for stapling/stapled with another amino acid residue comprising an olefin group to form a staple through one of the two olefin groups and/or with another amino acid residue comprising an olefin group to form a staple through the other of the two olefin groups
  SITE 6: note = (S)-3-(2-amino-2-carboxyethyl)benzoic acid
  SITE 7: note = 2-amino-2-methylpropanoic acid
  SITE 10: note = L-lysine, useful for stapling/stapled with another amino acid residue comprising a side chain acid group to form a staple through the 6-amino group
  SITE 11: note (S)-3-amino-1-((pent-4-en-1-yloxy)carbonyl)pyrrolidine-3-ca rboxylic acid, useful for stapling/stapled with another amino acid residue comprising an olefin group to form a staple through the olefin group
  SITE 12: note = (S)-2-amino-3-(2-(trifluoromethyl)phenyl)propanoic acid
  SITE 13: note = (S)-2-amino-3-(benzo[b]thiophen-3-yl)propanoic acid
  SITE 14: note = L-glutamic acid, useful for stapling/stapled with another amino acid residue comprising a side chain amino group to form a staple through the 4-carboxyl group
  SITE 15: note = (S)-2-amino-5-morpholinopentanoic acid
  SITE 16: note = C-term ethanamine
XDXXDXXAFKXXXEXS

SEQ ID NO: 187 - protein, 16 aa, synthetic construct
  SITE 1: note = N-term Acetic Acid
  SITE 1: note = (R)-2-allylpyrrolidine-2-carboxylic acid, useful for stapling/stapled with another amino acid residue comprising an olefin group to form a staple through the olefin group
  SITE 3: note = (S)-2-amino-4,4-dimethylpentanoic acid
  VARIANT 4: note = 2-amino-2-(pent-4-en-1-yl)hept-6-enoic acid, useful for stapling/stapled with another amino acid residue comprising an olefin group to form a staple through one of the two olefin groups and/or with another amino acid residue comprising an olefin group to form a staple through the other of the two olefin groups
  SITE 6: note = (S)-3-(2-amino-2-carboxyethyl)benzoic acid
  SITE 7: note = 2-amino-2-methylpropanoic acid
  SITE 10: note = L-lysine, useful for stapling/stapled with another amino acid residue comprising a side chain acid group to form a staple through the 6-amino group
  SITE 11: note (S)-3-amino-1-((pent-4-en-1-yloxy)carbonyl)pyrrolidine-3-ca rboxylic acid, useful for stapling/stapled with another amino acid residue comprising an olefin group to form a staple through the olefin group
  SITE 12: note = (S)-2-amino-3-(2-(trifluoromethyl)phenyl)propanoic acid
  SITE 13: note = (S)-2-amino-3-(benzo[b]thiophen-3-yl)propanoic acid
  SITE 14: note = L-glutamic acid, useful for stapling/stapled with another amino acid residue comprising a side chain amino group to form a staple through the 4-carboxyl group
  SITE 16: note = C-term amino
XDXXDXXAFKXXXEAS

SEQ ID NO: 188 - protein, 15 aa, synthetic construct
  SITE 1: note = N-term Acetic Acid
  SITE 1: note = (R)-2-allylpyrrolidine-2-carboxylic acid, useful for stapling/stapled with another amino acid residue comprising an olefin group to form a staple through the olefin group
  SITE 3: note = (S)-2-amino-4,4-dimethylpentanoic acid
  VARIANT 4: note = 2-amino-2-(pent-4-en-1-yl)hept-6-enoic acid, useful for stapling/stapled with another amino acid residue comprising an olefin group to form a staple through one of the two olefin groups and/or with another amino acid residue comprising an olefin group to form a staple through the other of the two olefin groups
  SITE 6: note = (S)-3-(2-amino-2-carboxyethyl)benzoic acid
  SITE 7: note = 2-amino-2-methylpropanoic acid
  SITE 10: note = L-lysine, useful for stapling/stapled with another amino acid residue comprising a side chain acid group to form a staple through the 6-amino group
  SITE 11: note (S)-3-amino-1-((pent-4-en-1-yloxy)carbonyl)pyrrolidine-3-ca rboxylic acid, useful for stapling/stapled with another amino acid residue comprising an olefin group to form a staple through the olefin group
  SITE 12: note = (S)-2-amino-3-(2-(trifluoromethyl)phenyl)propanoic acid
  SITE 13: note = (S)-2-amino-3-(benzo[b]thiophen-3-yl)propanoic acid
  SITE 14: note = L-glutamic acid, useful for stapling/stapled with another amino acid residue comprising a side chain amino group to form a staple through the 4-carboxyl group
  SITE 15: note = (S)-2-amino-5-morpholinopentanoic acid
  SITE 15: note = C-term amino
XDXXDXXAFKXXXEX

SEQ ID NO: 189 - protein, 16 aa, synthetic construct
  SITE 1: note = N-term Acetic Acid
  SITE 1: note = (R)-2-allylpyrrolidine-2-carboxylic acid, useful for stapling/stapled with another amino acid residue comprising an olefin group to form a staple through the olefin group
  SITE 3: note = (S)-2-amino-4,4-dimethylpentanoic acid
  VARIANT 4: note = 2-amino-2-(pent-4-en-1-yl)hept-6-enoic acid, useful for stapling/stapled with another amino acid residue comprising an olefin group to form a staple through one of the two olefin groups and/or with another amino acid residue comprising an olefin group to form a staple through the other of the two olefin groups
  SITE 6: note = (S)-3-(2-amino-2-carboxyethyl)benzoic acid
  SITE 7: note = 2-amino-2-methylpropanoic acid
  SITE 10: note = L-lysine, useful for stapling/stapled with another amino acid residue comprising a side chain acid group to form a staple through the 6-amino group
  SITE 11: note (S)-3-amino-1-((pent-4-en-1-yloxy)carbonyl)pyrrolidine-3-ca rboxylic acid, useful for stapling/stapled with another amino acid residue comprising an olefin group to form a staple through the olefin group
  SITE 12: note = (S)-2-amino-3-(2-(trifluoromethyl)phenyl)propanoic acid
  SITE 13: note = (S)-2-amino-3-(benzo[b]thiophen-3-yl)propanoic acid
  SITE 14: note = L-glutamic acid, useful for stapling/stapled with another amino acid residue comprising a side chain amino group to form a staple through the 4-carboxyl group
  SITE 15: note = (S)-2-amino-5-morpholinopentanoic acid
  SITE 16: note = C-term amino
XDXXDXXAFKXXXEXS

SEQ ID NO: 190 - protein, 15 aa, synthetic construct
  SITE 1: note = N-term Acetic Acid
  SITE 1: note = (S)-2-methylpyrrolidine-2-carboxylic acid
  SITE 3: note = (S)-2-amino-4,4-dimethylpentanoic acid
  SITE 4: note = (R)-2-amino-2-methylhex-5-enoic acid, useful for stapling/stapled with another amino acid residue comprising an olefin group to form a staple through the olefin group
  SITE 6: note = (S)-3-(2-amino-2-carboxyethyl)benzoic acid
  SITE 7: note = 2-amino-2-methylpropanoic acid
  SITE 10: note = L-lysine, useful for stapling/stapled with another amino acid residue comprising a side chain acid group to form a staple through the 6-amino group
  SITE 11: note (S)-3-amino-1-((pent-4-en-1-yloxy)carbonyl)pyrrolidine-3-ca rboxylic acid, useful for stapling/stapled with another amino acid residue comprising an olefin group to form a staple through the olefin group
  SITE 12: note = (S)-2-amino-3-(thiophen-3-yl)propanoic acid
  SITE 13: note = (S)-2-amino-3-(benzo[b]thiophen-3-yl)propanoic acid
  SITE 14: note = L-glutamic acid, useful for stapling/stapled with another amino acid residue comprising a side chain amino group to form a staple through the 4-carboxyl group
  SITE 15: note = C-term amino
XDXXDXXAFKXXXEA

SEQ ID NO: 191 - protein, 15 aa, synthetic construct
  SITE 1: note = N-term Acetic Acid
  SITE 1: note = (S)-2-methylpyrrolidine-2-carboxylic acid
  SITE 3: note = (S)-2-amino-4,4-dimethylpentanoic acid
  SITE 4: note = (R)-2-amino-2-methylhept-6-enoic acid, useful for stapling/stapled with another amino acid residue comprising an olefin group to form a staple through the olefin group
  SITE 6: note = (S)-3-(2-amino-2-carboxyethyl)benzoic acid
  SITE 7: note = 2-amino-2-methylpropanoic acid
  SITE 10: note = L-lysine, useful for stapling/stapled with another amino acid residue comprising a side chain acid group to form a staple through the 6-amino group
  SITE 11: note (S)-3-amino-1-((pent-4-en-1-yloxy)carbonyl)pyrrolidine-3-ca rboxylic acid, useful for stapling/stapled with another amino acid residue comprising an olefin group to form a staple through the olefin group
  SITE 12: note = (S)-2-amino-3-(thiophen-3-yl)propanoic acid
  SITE 13: note = (S)-2-amino-3-(benzo[b]thiophen-3-yl)propanoic acid
  SITE 14: note = L-glutamic acid, useful for stapling/stapled with another amino acid residue comprising a side chain amino group to form a staple through the 4-carboxyl group
  SITE 15: note = C-term amino
XDXXDXXAFKXXXEA

SEQ ID NO: 192 - protein, 15 aa, synthetic construct
  SITE 1: note = N-term Acetic Acid
  SITE 1: note = (S)-2-methylpyrrolidine-2-carboxylic acid
  SITE 3: note = (S)-2-amino-4,4-dimethylpentanoic acid
  SITE 4: note = (R)-2-amino-2-methyloct-7-enoic acid, useful for stapling/stapled with another amino acid residue comprising an olefin group to form a staple through the olefin group
  SITE 6: note = (S)-3-(2-amino-2-carboxyethyl)benzoic acid
  SITE 7: note = 2-amino-2-methylpropanoic acid
  SITE 10: note = L-lysine, useful for stapling/stapled with another amino acid residue comprising a side chain acid group to form a staple through the 6-amino group
  SITE 11: note (S)-3-amino-1-((pent-4-en-1-yloxy)carbonyl)pyrrolidine-3-ca rboxylic acid, useful for stapling/stapled with another amino acid residue comprising an olefin group to form a staple through the olefin group
  SITE 12: note = (S)-2-amino-3-(thiophen-3-yl)propanoic acid
  SITE 13: note = (S)-2-amino-3-(benzo[b]thiophen-3-yl)propanoic acid
  SITE 14: note = L-glutamic acid, useful for stapling/stapled with another amino acid residue comprising a side chain amino group to form a staple through the 4-carboxyl group
  SITE 15: note = C-term amino
XDXXDXXAFKXXXEA

SEQ ID NO: 193 - protein, 15 aa, synthetic construct
  SITE 1: note = N-term Acetic Acid
  SITE 1: note = (S)-2-methylpyrrolidine-2-carboxylic acid
  SITE 3: note = (S)-2-amino-4,4-dimethylpentanoic acid
  SITE 4: note = (R)-2-amino-2-methylhept-6-enoic acid, useful for stapling/stapled with another amino acid residue comprising an olefin group to form a staple through the olefin group
  SITE 6: note = (S)-3-(2-amino-2-carboxyethyl)benzoic acid
  SITE 10: note = L-lysine, useful for stapling/stapled with another amino acid residue comprising a side chain acid group to form a staple through the 6-amino group
  SITE 11: note (S)-3-amino-1-((pent-4-en-1-yloxy)carbonyl)pyrrolidine-3-ca rboxylic acid, useful for stapling/stapled with another amino acid residue comprising an olefin group to form a staple through the olefin group
  SITE 12: note = (S)-2-amino-3-(thiophen-3-yl)propanoic acid
  SITE 13: note = (S)-2-amino-3-(benzo[b]thiophen-3-yl)propanoic acid
  SITE 14: note = L-glutamic acid, useful for stapling/stapled with another amino acid residue comprising a side chain amino group to form a staple through the 4-carboxyl group
  SITE 15: note = C-term amino
XDXXDXAAFKXXXEA

SEQ ID NO: 194 - protein, 15 aa, synthetic construct
  SITE 1: note = N-term Acetic Acid
  SITE 1: note = (S)-2-methylpyrrolidine-2-carboxylic acid
  SITE 4: note = (R)-2-amino-2-methylhept-6-enoic acid, useful for stapling/stapled with another amino acid residue comprising an olefin group to form a staple through the olefin group
  SITE 6: note = (S)-3-(2-amino-2-carboxyethyl)benzoic acid
  SITE 7: note = 2-amino-2-methylpropanoic acid
  SITE 10: note = L-lysine, useful for stapling/stapled with another amino acid residue comprising a side chain acid group to form a staple through the 6-amino group
  SITE 11: note (S)-3-amino-1-((pent-4-en-1-yloxy)carbonyl)pyrrolidine-3-ca rboxylic acid, useful for stapling/stapled with another amino acid residue comprising an olefin group to form a staple through the olefin group
  SITE 12: note = (S)-2-amino-3-(thiophen-3-yl)propanoic acid
  SITE 13: note = (S)-2-amino-3-(benzo[b]thiophen-3-yl)propanoic acid
  SITE 14: note = L-glutamic acid, useful for stapling/stapled with another amino acid residue comprising a side chain amino group to form a staple through the 4-carboxyl group
  SITE 15: note = C-term amino
XDVXDXXAFKXXXEA

SEQ ID NO: 195 - protein, 15 aa, synthetic construct
  SITE 1: note = N-term Acetic Acid
  SITE 1: note = (S)-2-methylpyrrolidine-2-carboxylic acid
  SITE 3: note = (S)-2-aminohexanoic acid
  SITE 4: note = (R)-2-amino-2-methylhept-6-enoic acid, useful for stapling/stapled with another amino acid residue comprising an olefin group to form a staple through the olefin group
  SITE 6: note = (S)-3-(2-amino-2-carboxyethyl)benzoic acid
  SITE 7: note = 2-amino-2-methylpropanoic acid
  SITE 10: note = L-lysine, useful for stapling/stapled with another amino acid residue comprising a side chain acid group to form a staple through the 6-amino group
  SITE 11: note (S)-3-amino-1-((pent-4-en-1-yloxy)carbonyl)pyrrolidine-3-ca rboxylic acid, useful for stapling/stapled with another amino acid residue comprising an olefin group to form a staple through the olefin group
  SITE 12: note = (S)-2-amino-3-(thiophen-3-yl)propanoic acid
  SITE 13: note = (S)-2-amino-3-(benzo[b]thiophen-3-yl)propanoic acid
  SITE 14: note = L-glutamic acid, useful for stapling/stapled with another amino acid residue comprising a side chain amino group to form a staple through the 4-carboxyl group
  SITE 15: note = C-term amino
XDXXDXXAFKXXXEA

SEQ ID NO: 196 - protein, 15 aa, synthetic construct
  SITE 1: note = N-term Acetic Acid
  SITE 1: note = (S)-2-methylpyrrolidine-2-carboxylic acid
  SITE 3: note = (S)-2-amino-4,4-dimethylpentanoic acid
  SITE 4: note = (R)-2-amino-2-methylhex-5-enoic acid, useful for stapling/stapled with another amino acid residue comprising an olefin group to form a staple through the olefin group
  SITE 6: note (S)-2-amino-3-((carboxymethyl)(2,2,2-trifluoroethyl)amino) propanoic acid
  SITE 7: note = 2-amino-2-methylpropanoic acid
  SITE 10: note = L-lysine, useful for stapling/stapled with another amino acid residue comprising a side chain acid group to form a staple through the 6-amino group
  SITE 11: note (S)-3-amino-1-((pent-4-en-1-yloxy)carbonyl)pyrrolidine-3-ca rboxylic acid, useful for stapling/stapled with another amino acid residue comprising an olefin group to form a staple through the olefin group
  SITE 12: note = (S)-2-amino-3-(thiophen-3-yl)propanoic acid
  SITE 13: note = (S)-2-amino-3-(benzo[b]thiophen-3-yl)propanoic acid
  SITE 14: note = L-glutamic acid, useful for stapling/stapled with another amino acid residue comprising a side chain amino group to form a staple through the 4-carboxyl group
  SITE 15: note = C-term amino
XDXXDXXAFKXXXEA

SEQ ID NO: 197 - protein, 15 aa, synthetic construct
  SITE 1: note = N-term Acetic Acid
  SITE 1: note = (S)-2-methylpyrrolidine-2-carboxylic acid
  SITE 3: note = (S)-2-amino-4,4-dimethylpentanoic acid
  SITE 4: note = (R)-2-amino-2-methylhept-6-enoic acid, useful for stapling/stapled with another amino acid residue comprising an olefin group to form a staple through the olefin group
  SITE 6: note (S)-2-amino-3-((carboxymethyl)(2,2,2-trifluoroethyl)amino) propanoic acid
  SITE 7: note = 2-amino-2-methylpropanoic acid
  SITE 10: note = L-lysine, useful for stapling/stapled with another amino acid residue comprising a side chain acid group to form a staple through the 6-amino group
  SITE 11: note (S)-3-amino-1-((pent-4-en-1-yloxy)carbonyl)pyrrolidine-3-ca rboxylic acid, useful for stapling/stapled with another amino acid residue comprising an olefin group to form a staple through the olefin group
  SITE 12: note = (S)-2-amino-3-(thiophen-3-yl)propanoic acid
  SITE 13: note = (S)-2-amino-3-(benzo[b]thiophen-3-yl)propanoic acid
  SITE 14: note = L-glutamic acid, useful for stapling/stapled with another amino acid residue comprising a side chain amino group to form a staple through the 4-carboxyl group
  SITE 15: note = C-term amino
XDXXDXXAFKXXXEA

SEQ ID NO: 198 - protein, 15 aa, synthetic construct
  SITE 1: note = N-term Acetic Acid
  SITE 1: note = (S)-2-methylpyrrolidine-2-carboxylic acid
  SITE 3: note = (S)-2-amino-4,4-dimethylpentanoic acid
  SITE 4: note = (R)-2-amino-2-methyloct-7-enoic acid, useful for stapling/stapled with another amino acid residue comprising an olefin group to form a staple through the olefin group
  SITE 6: note (S)-2-amino-3-((carboxymethyl)(2,2,2-trifluoroethyl)amino) propanoic acid
  SITE 7: note = 2-amino-2-methylpropanoic acid
  SITE 10: note = L-lysine, useful for stapling/stapled with another amino acid residue comprising a side chain acid group to form a staple through the 6-amino group
  SITE 11: note (S)-3-amino-1-((pent-4-en-1-yloxy)carbonyl)pyrrolidine-3-ca rboxylic acid, useful for stapling/stapled with another amino acid residue comprising an olefin group to form a staple through the olefin group
  SITE 12: note = (S)-2-amino-3-(thiophen-3-yl)propanoic acid
  SITE 13: note = (S)-2-amino-3-(benzo[b]thiophen-3-yl)propanoic acid
  SITE 14: note = L-glutamic acid, useful for stapling/stapled with another amino acid residue comprising a side chain amino group to form a staple through the 4-carboxyl group
  SITE 15: note = C-term amino
XDXXDXXAFKXXXEA

SEQ ID NO: 199 - protein, 15 aa, synthetic construct
  SITE 1: note = N-term Acetic Acid
  SITE 1: note = (S)-2-methylpyrrolidine-2-carboxylic acid
  SITE 3: note = (S)-2-amino-4,4-dimethylpentanoic acid
  SITE 4: note = (R)-2-amino-2-methylhept-6-enoic acid, useful for stapling/stapled with another amino acid residue comprising an olefin group to form a staple through the olefin group
  SITE 6: note (S)-2-amino-3-((carboxymethyl)(2,2,2-trifluoroethyl)amino) propanoic acid
  SITE 10: note = L-lysine, useful for stapling/stapled with another amino acid residue comprising a side chain acid group to form a staple through the 6-amino group
  SITE 11: note (S)-3-amino-1-((pent-4-en-1-yloxy)carbonyl)pyrrolidine-3-ca rboxylic acid, useful for stapling/stapled with another amino acid residue comprising an olefin group to form a staple through the olefin group
  SITE 12: note = (S)-2-amino-3-(thiophen-3-yl)propanoic acid
  SITE 13: note = (S)-2-amino-3-(benzo[b]thiophen-3-yl)propanoic acid
  SITE 14: note = L-glutamic acid, useful for stapling/stapled with another amino acid residue comprising a side chain amino group to form a staple through the 4-carboxyl group
  SITE 15: note = C-term amino
XDXXDXAAFKXXXEA

SEQ ID NO: 200 - protein, 15 aa, synthetic construct
  SITE 1: note = N-term Acetic Acid
  SITE 1: note = (S)-2-methylpyrrolidine-2-carboxylic acid
  SITE 4: note = (R)-2-amino-2-methylhept-6-enoic acid, useful for stapling/stapled with another amino acid residue comprising an olefin group to form a staple through the olefin group
  SITE 6: note (S)-2-amino-3-((carboxymethyl)(2,2,2-trifluoroethyl)amino) propanoic acid
  SITE 7: note = 2-amino-2-methylpropanoic acid
  SITE 10: note = L-lysine, useful for stapling/stapled with another amino acid residue comprising a side chain acid group to form a staple through the 6-amino group
  SITE 11: note (S)-3-amino-1-((pent-4-en-1-yloxy)carbonyl)pyrrolidine-3-ca rboxylic acid, useful for stapling/stapled with another amino acid residue comprising an olefin group to form a staple through the olefin group
  SITE 12: note = (S)-2-amino-3-(thiophen-3-yl)propanoic acid
  SITE 13: note = (S)-2-amino-3-(benzo[b]thiophen-3-yl)propanoic acid
  SITE 14: note = L-glutamic acid, useful for stapling/stapled with another amino acid residue comprising a side chain amino group to form a staple through the 4-carboxyl group
  SITE 15: note = C-term amino
XDVXDXXAFKXXXEA

SEQ ID NO: 201 - protein, 15 aa, synthetic construct
  SITE 1: note = N-term Acetic Acid
  SITE 1: note = (S)-2-methylpyrrolidine-2-carboxylic acid
  SITE 3: note = (S)-2-aminohexanoic acid
  SITE 4: note = (R)-2-amino-2-methylhept-6-enoic acid, useful for stapling/stapled with another amino acid residue comprising an olefin group to form a staple through the olefin group
  SITE 6: note (S)-2-amino-3-((carboxymethyl)(2,2,2-trifluoroethyl)amino) propanoic acid
  SITE 7: note = 2-amino-2-methylpropanoic acid
  SITE 10: note = L-lysine, useful for stapling/stapled with another amino acid residue comprising a side chain acid group to form a staple through the 6-amino group
  SITE 11: note (S)-3-amino-1-((pent-4-en-1-yloxy)carbonyl)pyrrolidine-3-ca rboxylic acid, useful for stapling/stapled with another amino acid residue comprising an olefin group to form a staple through the olefin group
  SITE 12: note = (S)-2-amino-3-(thiophen-3-yl)propanoic acid
  SITE 13: note = (S)-2-amino-3-(benzo[b]thiophen-3-yl)propanoic acid
  SITE 14: note = L-glutamic acid, useful for stapling/stapled with another amino acid residue comprising a side chain amino group to form a staple through the 4-carboxyl group
  SITE 15: note = C-term amino
XDXXDXXAFKXXXEA

SEQ ID NO: 202 - protein, 15 aa, synthetic construct
  SITE 1: note = N-term Acetic Acid
  SITE 1: note = (R)-2-allylpyrrolidine-2-carboxylic acid, useful for stapling/stapled with another amino acid residue comprising an olefin group to form a staple through the olefin group
  SITE 3: note = (S)-2-aminohexanoic acid
  VARIANT 4: note = 2-amino-2-(pent-4-en-1-yl)hept-6-enoic acid, useful for stapling/stapled with another amino acid residue comprising an olefin group to form a staple through one of the two olefin groups and/or with another amino acid residue comprising an olefin group to form a staple through the other of the two olefin groups
  SITE 6: note = (S)-3-(2-amino-2-carboxyethyl)benzoic acid
  SITE 7: note = 2-amino-2-methylpropanoic acid
  SITE 10: note = L-lysine, useful for stapling/stapled with another amino acid residue comprising a side chain acid group to form a staple through the 6-amino group
  SITE 11: note (S)-3-amino-1-((pent-4-en-1-yloxy)carbonyl)pyrrolidine-3-ca rboxylic acid, useful for stapling/stapled with another amino acid residue comprising an olefin group to form a staple through the olefin group
  SITE 12: note = (S)-2-amino-3-(thiophen-3-yl)propanoic acid
  SITE 13: note = (S)-2-amino-3-(benzo[b]thiophen-3-yl)propanoic acid
  SITE 14: note = L-glutamic acid, useful for stapling/stapled with another amino acid residue comprising a side chain amino group to form a staple through the 4-carboxyl group
  SITE 15: note = C-term amino
XDXXDXXAFKXXXEA

SEQ ID NO: 203 - protein, 15 aa, synthetic construct
  SITE 1: note = N-term Acetic Acid
  SITE 1: note = (R)-2-allylpyrrolidine-2-carboxylic acid, useful for stapling/stapled with another amino acid residue comprising an olefin group to form a staple through the olefin group
  VARIANT 4: note = 2-amino-2-(pent-4-en-1-yl)hept-6-enoic acid, useful for stapling/stapled with another amino acid residue comprising an olefin group to form a staple through one of the two olefin groups and/or with another amino acid residue comprising an olefin group to form a staple through the other of the two olefin groups
  SITE 6: note = (S)-3-(2-amino-2-carboxyethyl)benzoic acid
  SITE 7: note = 2-amino-2-methylpropanoic acid
  SITE 10: note = L-lysine, useful for stapling/stapled with another amino acid residue comprising a side chain acid group to form a staple through the 6-amino group
  SITE 11: note (S)-3-amino-1-((pent-4-en-1-yloxy)carbonyl)pyrrolidine-3-ca rboxylic acid, useful for stapling/stapled with another amino acid residue comprising an olefin group to form a staple through the olefin group
  SITE 12: note = (S)-2-amino-3-(thiophen-3-yl)propanoic acid
  SITE 13: note = (S)-2-amino-3-(benzo[b]thiophen-3-yl)propanoic acid
  SITE 14: note = L-glutamic acid, useful for stapling/stapled with another amino acid residue comprising a side chain amino group to form a staple through the 4-carboxyl group
  SITE 15: note = C-term amino
XDLXDXXAFKXXXEA

SEQ ID NO: 204 - protein, 15 aa, synthetic construct
  SITE 1: note = N-term Acetic Acid
  SITE 1: note = (R)-2-allylpyrrolidine-2-carboxylic acid, useful for stapling/stapled with another amino acid residue comprising an olefin group to form a staple through the olefin group
  VARIANT 4: note = 2-amino-2-(pent-4-en-1-yl)hept-6-enoic acid, useful for stapling/stapled with another amino acid residue comprising an olefin group to form a staple through one of the two olefin groups and/or with another amino acid residue comprising an olefin group to form a staple through the other of the two olefin groups
  SITE 6: note = (S)-3-(2-amino-2-carboxyethyl)benzoic acid
  SITE 7: note = 2-amino-2-methylpropanoic acid
  SITE 10: note = L-lysine, useful for stapling/stapled with another amino acid residue comprising a side chain acid group to form a staple through the 6-amino group
  SITE 11: note (S)-3-amino-1-((pent-4-en-1-yloxy)carbonyl)pyrrolidine-3-ca rboxylic acid, useful for stapling/stapled with another amino acid residue comprising an olefin group to form a staple through the olefin group
  SITE 12: note = (S)-2-amino-3-(thiophen-3-yl)propanoic acid
  SITE 13: note = (S)-2-amino-3-(benzo[b]thiophen-3-yl)propanoic acid
  SITE 14: note = L-glutamic acid, useful for stapling/stapled with another amino acid residue comprising a side chain amino group to form a staple through the 4-carboxyl group
  SITE 15: note = C-term amino
XDIXDXXAFKXXXEA

SEQ ID NO: 205 - protein, 15 aa, synthetic construct
  SITE 1: note = N-term Acetic Acid
  SITE 1: note = (R)-2-allylpyrrolidine-2-carboxylic acid, useful for stapling/stapled with another amino acid residue comprising an olefin group to form a staple through the olefin group
  VARIANT 4: note = 2-amino-2-(pent-4-en-1-yl)hept-6-enoic acid, useful for stapling/stapled with another amino acid residue comprising an olefin group to form a staple through one of the two olefin groups and/or with another amino acid residue comprising an olefin group to form a staple through the other of the two olefin groups
  SITE 6: note = (S)-3-(2-amino-2-carboxyethyl)benzoic acid
  SITE 7: note = 2-amino-2-methylpropanoic acid
  SITE 10: note = L-lysine, useful for stapling/stapled with another amino acid residue comprising a side chain acid group to form a staple through the 6-amino group
  SITE 11: note (S)-3-amino-1-((pent-4-en-1-yloxy)carbonyl)pyrrolidine-3-ca rboxylic acid, useful for stapling/stapled with another amino acid residue comprising an olefin group to form a staple through the olefin group
  SITE 12: note = (S)-2-amino-3-(thiophen-3-yl)propanoic acid
  SITE 13: note = (S)-2-amino-3-(benzo[b]thiophen-3-yl)propanoic acid
  SITE 14: note = L-glutamic acid, useful for stapling/stapled with another amino acid residue comprising a side chain amino group to form a staple through the 4-carboxyl group
  SITE 15: note = C-term amino
XDVXDXXAFKXXXEA

SEQ ID NO: 206 - protein, 15 aa, synthetic construct
  SITE 1: note = N-term Acetic Acid
  SITE 1: note = (R)-2-allylpyrrolidine-2-carboxylic acid, useful for stapling/stapled with another amino acid residue comprising an olefin group to form a staple through the olefin group
  VARIANT 4: note = 2-amino-2-(pent-4-en-1-yl)hept-6-enoic acid, useful for stapling/stapled with another amino acid residue comprising an olefin group to form a staple through one of the two olefin groups and/or with another amino acid residue comprising an olefin group to form a staple through the other of the two olefin groups
  SITE 6: note = (S)-3-(2-amino-2-carboxyethyl)benzoic acid
  SITE 7: note = 2-amino-2-methylpropanoic acid
  SITE 10: note = L-lysine, useful for stapling/stapled with another amino acid residue comprising a side chain acid group to form a staple through the 6-amino group
  SITE 11: note (S)-3-amino-1-((pent-4-en-1-yloxy)carbonyl)pyrrolidine-3-ca rboxylic acid, useful for stapling/stapled with another amino acid residue comprising an olefin group to form a staple through the olefin group
  SITE 12: note = (S)-2-amino-3-(thiophen-3-yl)propanoic acid
  SITE 13: note = (S)-2-amino-3-(benzo[b]thiophen-3-yl)propanoic acid
  SITE 14: note = L-glutamic acid, useful for stapling/stapled with another amino acid residue comprising a side chain amino group to form a staple through the 4-carboxyl group
  SITE 15: note = C-term amino
XDFXDXXAFKXXXEA

SEQ ID NO: 207 - protein, 15 aa, synthetic construct
  SITE 1: note = N-term Acetic Acid
  SITE 1: note = (R)-2-allylpyrrolidine-2-carboxylic acid, useful for stapling/stapled with another amino acid residue comprising an olefin group to form a staple through the olefin group
  SITE 3: note = (S)-2-amino-3-cyclohexylpropanoic acid
  VARIANT 4: note = 2-amino-2-(pent-4-en-1-yl)hept-6-enoic acid, useful for stapling/stapled with another amino acid residue comprising an olefin group to form a staple through one of the two olefin groups and/or with another amino acid residue comprising an olefin group to form a staple through the other of the two olefin groups
  SITE 6: note = (S)-3-(2-amino-2-carboxyethyl)benzoic acid
  SITE 7: note = 2-amino-2-methylpropanoic acid
  SITE 10: note = L-lysine, useful for stapling/stapled with another amino acid residue comprising a side chain acid group to form a staple through the 6-amino group
  SITE 11: note (S)-3-amino-1-((pent-4-en-1-yloxy)carbonyl)pyrrolidine-3-ca rboxylic acid, useful for stapling/stapled with another amino acid residue comprising an olefin group to form a staple through the olefin group
  SITE 12: note = (S)-2-amino-3-(thiophen-3-yl)propanoic acid
  SITE 13: note = (S)-2-amino-3-(benzo[b]thiophen-3-yl)propanoic acid
  SITE 14: note = L-glutamic acid, useful for stapling/stapled with another amino acid residue comprising a side chain amino group to form a staple through the 4-carboxyl group
  SITE 15: note = C-term amino
XDXXDXXAFKXXXEA

SEQ ID NO: 208 - protein, 15 aa, synthetic construct
  SITE 1: note = N-term Acetic Acid
  SITE 1: note = (R)-2-allylpyrrolidine-2-carboxylic acid, useful for stapling/stapled with another amino acid residue comprising an olefin group to form a staple through the olefin group
  SITE 3: note = (S)-2-amino-3-cyclopentylpropanoic acid
  VARIANT 4: note = 2-amino-2-(pent-4-en-1-yl)hept-6-enoic acid, useful for stapling/stapled with another amino acid residue comprising an olefin group to form a staple through one of the two olefin groups and/or with another amino acid residue comprising an olefin group to form a staple through the other of the two olefin groups
  SITE 6: note = (S)-3-(2-amino-2-carboxyethyl)benzoic acid
  SITE 7: note = 2-amino-2-methylpropanoic acid
  SITE 10: note = L-lysine, useful for stapling/stapled with another amino acid residue comprising a side chain acid group to form a staple through the 6-amino group
  SITE 11: note (S)-3-amino-1-((pent-4-en-1-yloxy)carbonyl)pyrrolidine-3-ca rboxylic acid, useful for stapling/stapled with another amino acid residue comprising an olefin group to form a staple through the olefin group
  SITE 12: note = (S)-2-amino-3-(thiophen-3-yl)propanoic acid
  SITE 13: note = (S)-2-amino-3-(benzo[b]thiophen-3-yl)propanoic acid
  SITE 14: note = L-glutamic acid, useful for stapling/stapled with another amino acid residue comprising a side chain amino group to form a staple through the 4-carboxyl group
  SITE 15: note = C-term amino
XDXXDXXAFKXXXEA

SEQ ID NO: 209 - protein, 15 aa, synthetic construct
  SITE 1: note = N-term Acetic Acid
  SITE 1: note = (R)-2-allylpyrrolidine-2-carboxylic acid, useful for stapling/stapled with another amino acid residue comprising an olefin group to form a staple through the olefin group
  SITE 3: note = 1-aminocyclopentane-1-carboxylic acid
  VARIANT 4: note = 2-amino-2-(pent-4-en-1-yl)hept-6-enoic acid, useful for stapling/stapled with another amino acid residue comprising an olefin group to form a staple through one of the two olefin groups and/or with another amino acid residue comprising an olefin group to form a staple through the other of the two olefin groups
  SITE 6: note = (S)-3-(2-amino-2-carboxyethyl)benzoic acid
  SITE 7: note = 2-amino-2-methylpropanoic acid
  SITE 10: note = L-lysine, useful for stapling/stapled with another amino acid residue comprising a side chain acid group to form a staple through the 6-amino group
  SITE 11: note (S)-3-amino-1-((pent-4-en-1-yloxy)carbonyl)pyrrolidine-3-ca rboxylic acid, useful for stapling/stapled with another amino acid residue comprising an olefin group to form a staple through the olefin group
  SITE 12: note = (S)-2-amino-3-(thiophen-3-yl)propanoic acid
  SITE 13: note = (S)-2-amino-3-(benzo[b]thiophen-3-yl)propanoic acid
  SITE 14: note = L-glutamic acid, useful for stapling/stapled with another amino acid residue comprising a side chain amino group to form a staple through the 4-carboxyl group
  SITE 15: note = C-term amino
XDXXDXXAFKXXXEA

SEQ ID NO: 210 - protein, 15 aa, synthetic construct
  SITE 1: note = N-term Acetic Acid
  SITE 1: note = (R)-2-allylpyrrolidine-2-carboxylic acid, useful for stapling/stapled with another amino acid residue comprising an olefin group to form a staple through the olefin group
  SITE 3: note = (S)-2-amino-2-cyclohexylacetic acid
  VARIANT 4: note = 2-amino-2-(pent-4-en-1-yl)hept-6-enoic acid, useful for stapling/stapled with another amino acid residue comprising an olefin group to form a staple through one of the two olefin groups and/or with another amino acid residue comprising an olefin group to form a staple through the other of the two olefin groups
  SITE 6: note = (S)-3-(2-amino-2-carboxyethyl)benzoic acid
  SITE 7: note = 2-amino-2-methylpropanoic acid
  SITE 10: note = L-lysine, useful for stapling/stapled with another amino acid residue comprising a side chain acid group to form a staple through the 6-amino group
  SITE 11: note (S)-3-amino-1-((pent-4-en-1-yloxy)carbonyl)pyrrolidine-3-ca rboxylic acid, useful for stapling/stapled with another amino acid residue comprising an olefin group to form a staple through the olefin group
  SITE 12: note = (S)-2-amino-3-(thiophen-3-yl)propanoic acid
  SITE 13: note = (S)-2-amino-3-(benzo[b]thiophen-3-yl)propanoic acid
  SITE 14: note = L-glutamic acid, useful for stapling/stapled with another amino acid residue comprising a side chain amino group to form a staple through the 4-carboxyl group
  SITE 15: note = C-term amino
XDXXDXXAFKXXXEA

SEQ ID NO: 211 - protein, 15 aa, synthetic construct
  SITE 1: note = N-term Acetic Acid
  SITE 1: note = (R)-2-allylpyrrolidine-2-carboxylic acid, useful for stapling/stapled with another amino acid residue comprising an olefin group to form a staple through the olefin group
  SITE 3: note = (S)-2-amino-3-(perfluorophenyl)propanoic acid
  VARIANT 4: note = 2-amino-2-(pent-4-en-1-yl)hept-6-enoic acid, useful for stapling/stapled with another amino acid residue comprising an olefin group to form a staple through one of the two olefin groups and/or with another amino acid residue comprising an olefin group to form a staple through the other of the two olefin groups
  SITE 6: note = (S)-3-(2-amino-2-carboxyethyl)benzoic acid
  SITE 7: note = 2-amino-2-methylpropanoic acid
  SITE 10: note = L-lysine, useful for stapling/stapled with another amino acid residue comprising a side chain acid group to form a staple through the 6-amino group
  SITE 11: note (S)-3-amino-1-((pent-4-en-1-yloxy)carbonyl)pyrrolidine-3-ca rboxylic acid, useful for stapling/stapled with another amino acid residue comprising an olefin group to form a staple through the olefin group
  SITE 12: note = (S)-2-amino-3-(thiophen-3-yl)propanoic acid
  SITE 13: note = (S)-2-amino-3-(benzo[b]thiophen-3-yl)propanoic acid
  SITE 14: note = L-glutamic acid, useful for stapling/stapled with another amino acid residue comprising a side chain amino group to form a staple through the 4-carboxyl group
  SITE 15: note = C-term amino
XDXXDXXAFKXXXEA

SEQ ID NO: 212 - protein, 15 aa, synthetic construct
  SITE 1: note = N-term Acetic Acid
  SITE 1: note = (R)-2-allylpyrrolidine-2-carboxylic acid, useful for stapling/stapled with another amino acid residue comprising an olefin group to form a staple through the olefin group
  SITE 3: note = (S)-2-amino-3-ethylpentanoic acid
  VARIANT 4: note = 2-amino-2-(pent-4-en-1-yl)hept-6-enoic acid, useful for stapling/stapled with another amino acid residue comprising an olefin group to form a staple through one of the two olefin groups and/or with another amino acid residue comprising an olefin group to form a staple through the other of the two olefin groups
  SITE 6: note = (S)-3-(2-amino-2-carboxyethyl)benzoic acid
  SITE 7: note = 2-amino-2-methylpropanoic acid
  SITE 10: note = L-lysine, useful for stapling/stapled with another amino acid residue comprising a side chain acid group to form a staple through the 6-amino group
  SITE 11: note (S)-3-amino-1-((pent-4-en-1-yloxy)carbonyl)pyrrolidine-3-ca rboxylic acid, useful for stapling/stapled with another amino acid residue comprising an olefin group to form a staple through the olefin group
  SITE 12: note = (S)-2-amino-3-(thiophen-3-yl)propanoic acid
  SITE 13: note = (S)-2-amino-3-(benzo[b]thiophen-3-yl)propanoic acid
  SITE 14: note = L-glutamic acid, useful for stapling/stapled with another amino acid residue comprising a side chain amino group to form a staple through the 4-carboxyl group
  SITE 15: note = C-term amino
XDXXDXXAFKXXXEA

SEQ ID NO: 213 - protein, 15 aa, synthetic construct
  SITE 1: note = N-term Acetic Acid
  SITE 1: note = (R)-2-allylpyrrolidine-2-carboxylic acid, useful for stapling/stapled with another amino acid residue comprising an olefin group to form a staple through the olefin group
  SITE 3: note = (S)-2-amino-4,4-dimethylpentanoic acid
  VARIANT 4: note = 2-amino-2-(pent-4-en-1-yl)hept-6-enoic acid, useful for stapling/stapled with another amino acid residue comprising an olefin group to form a staple through one of the two olefin groups and/or with another amino acid residue comprising an olefin group to form a staple through the other of the two olefin groups
  SITE 6: note = (S)-3-(2-amino-2-carboxyethyl)benzoic acid
  SITE 10: note = (S)-2-amino-3-(piperidin-4-yl)propanoic acid, useful for stapling/stapled with another amino acid residue comprising a side chain acid group to form a staple through the piperidinyl group
  SITE 11: note (S)-3-amino-1-((pent-4-en-1-yloxy)carbonyl)pyrrolidine-3-ca rboxylic acid, useful for stapling/stapled with another amino acid residue comprising an olefin group to form a staple through the olefin group
  SITE 12: note = (S)-2-amino-3-(thiophen-3-yl)propanoic acid
  SITE 13: note = (S)-2-amino-3-(benzo[b]thiophen-3-yl)propanoic acid
  SITE 14: note = L-glutamic acid, useful for stapling/stapled with another amino acid residue comprising a side chain amino group to form a staple through the 4-carboxyl group
  SITE 15: note = C-term amino
XDXXDXAAFXXXXEA

SEQ ID NO: 214 - protein, 15 aa, synthetic construct
  SITE 1: note = N-term Acetic Acid
  SITE 1: note = (R)-2-allylpyrrolidine-2-carboxylic acid, useful for stapling/stapled with another amino acid residue comprising an olefin group to form a staple through the olefin group
  SITE 3: note = (S)-2-amino-4,4-dimethylpentanoic acid
  VARIANT 4: note = 2-amino-2-(pent-4-en-1-yl)hept-6-enoic acid, useful for stapling/stapled with another amino acid residue comprising an olefin group to form a staple through one of the two olefin groups and/or with another amino acid residue comprising an olefin group to form a staple through the other of the two olefin groups
  SITE 6: note = (S)-3-(2-amino-2-carboxyethyl)benzoic acid
  SITE 10: note = (S)-2-amino-3-(piperidin-4-yl)propanoic acid, useful for stapling/stapled with another amino acid residue comprising a side chain acid group to form a staple through the piperidinyl group
  SITE 11: note (S)-3-amino-1-((pent-4-en-1-yloxy)carbonyl)pyrrolidine-3-ca rboxylic acid, useful for stapling/stapled with another amino acid residue comprising an olefin group to form a staple through the olefin group
  SITE 12: note = (S)-2-amino-3-(2-(trifluoromethyl)phenyl)propanoic acid
  SITE 13: note = (S)-2-amino-3-(benzo[b]thiophen-3-yl)propanoic acid
  SITE 14: note = L-glutamic acid, useful for stapling/stapled with another amino acid residue comprising a side chain amino group to form a staple through the 4-carboxyl group
  SITE 15: note = C-term amino
XDXXDXAAFXXXXEA

SEQ ID NO: 215 - protein, 15 aa, synthetic construct
  SITE 1: note = N-term Acetic Acid
  SITE 1: note = (R)-2-allylpyrrolidine-2-carboxylic acid, useful for stapling/stapled with another amino acid residue comprising an olefin group to form a staple through the olefin group
  SITE 3: note = (S)-2-amino-4,4-dimethylpentanoic acid
  VARIANT 4: note = 2-amino-2-(pent-4-en-1-yl)hept-6-enoic acid, useful for stapling/stapled with another amino acid residue comprising an olefin group to form a staple through one of the two olefin groups and/or with another amino acid residue comprising an olefin group to form a staple through the other of the two olefin groups
  SITE 6: note = (S)-3-(2-amino-2-carboxyethyl)benzoic acid
  SITE 10: note = L-glutamic acid, useful for stapling/stapled with another amino acid residue comprising a side chain amino group to form a staple through the 4-carboxyl group
  SITE 11: note (S)-3-amino-1-((pent-4-en-1-yloxy)carbonyl)pyrrolidine-3-ca rboxylic acid, useful for stapling/stapled with another amino acid residue comprising an olefin group to form a staple through the olefin group
  SITE 12: note = (S)-2-amino-3-(thiophen-3-yl)propanoic acid
  SITE 13: note = (S)-2-amino-3-(benzo[b]thiophen-3-yl)propanoic acid
  SITE 14: note = (S)-2-amino-3-(piperidin-4-yl)propanoic acid, useful for stapling/stapled with another amino acid residue comprising a side chain acid group to form a staple through the piperidinyl group
  SITE 15: note = C-term amino
XDXXDXAAFEXXXXA

SEQ ID NO: 216 - protein, 15 aa, synthetic construct
  SITE 1: note = N-term Acetic Acid
  SITE 1: note = (R)-2-allylpyrrolidine-2-carboxylic acid, useful for stapling/stapled with another amino acid residue comprising an olefin group to form a staple through the olefin group
  SITE 3: note = (S)-2-amino-4,4-dimethylpentanoic acid
  VARIANT 4: note = 2-amino-2-(pent-4-en-1-yl)hept-6-enoic acid, useful for stapling/stapled with another amino acid residue comprising an olefin group to form a staple through one of the two olefin groups and/or with another amino acid residue comprising an olefin group to form a staple through the other of the two olefin groups
  SITE 6: note = (S)-3-(2-amino-2-carboxyethyl)benzoic acid
  SITE 10: note = L-glutamic acid, useful for stapling/stapled with another amino acid residue comprising a side chain amino group to form a staple through the 4-carboxyl group
  SITE 11: note (S)-3-amino-1-((pent-4-en-1-yloxy)carbonyl)pyrrolidine-3-ca rboxylic acid, useful for stapling/stapled with another amino acid residue comprising an olefin group to form a staple through the olefin group
  SITE 12: note = (S)-2-amino-3-(2-(trifluoromethyl)phenyl)propanoic acid
  SITE 13: note = (S)-2-amino-3-(benzo[b]thiophen-3-yl)propanoic acid
  SITE 14: note = (S)-2-amino-3-(piperidin-4-yl)propanoic acid, useful for stapling/stapled with another amino acid residue comprising a side chain acid group to form a staple through the piperidinyl group
  SITE 15: note = C-term amino
XDXXDXAAFEXXXXA

SEQ ID NO: 217 - protein, 15 aa, synthetic construct
  SITE 1: note = N-term Acetic Acid
  SITE 1: note = (R)-2-allylpyrrolidine-2-carboxylic acid, useful for stapling/stapled with another amino acid residue comprising an olefin group to form a staple through the olefin group
  SITE 3: note = (S)-2-amino-4,4-dimethylpentanoic acid
  VARIANT 4: note = 2-amino-2-(pent-4-en-1-yl)hept-6-enoic acid, useful for stapling/stapled with another amino acid residue comprising an olefin group to form a staple through one of the two olefin groups and/or with another amino acid residue comprising an olefin group to form a staple through the other of the two olefin groups
  SITE 6: note = (S)-3-(2-amino-2-carboxyethyl)benzoic acid
  SITE 10: note = (S)-2-aminohexanedioic acid, useful for stapling/stapled with another amino acid residue comprising a side chain amino group to form a staple through the 5-carboxyl group
  SITE 11: note (S)-3-amino-1-((pent-4-en-1-yloxy)carbonyl)pyrrolidine-3-ca rboxylic acid, useful for stapling/stapled with another amino acid residue comprising an olefin group to form a staple through the olefin group
  SITE 12: note = (S)-2-amino-3-(thiophen-3-yl)propanoic acid
  SITE 13: note = (S)-2-amino-3-(benzo[b]thiophen-3-yl)propanoic acid
  SITE 14: note = (S)-2-amino-3-(piperidin-4-yl)propanoic acid, useful for stapling/stapled with another amino acid residue comprising a side chain acid group to form a staple through the piperidinyl group
  SITE 15: note = C-term amino
XDXXDXAAFXXXXXA

SEQ ID NO: 218 - protein, 15 aa, synthetic construct
  SITE 1: note = N-term Acetic Acid
  SITE 1: note = (R)-2-allylpyrrolidine-2-carboxylic acid, useful for stapling/stapled with another amino acid residue comprising an olefin group to form a staple through the olefin group
  SITE 3: note = (S)-2-amino-4,4-dimethylpentanoic acid
  VARIANT 4: note = 2-amino-2-(pent-4-en-1-yl)hept-6-enoic acid, useful for stapling/stapled with another amino acid residue comprising an olefin group to form a staple through one of the two olefin groups and/or with another amino acid residue comprising an olefin group to form a staple through the other of the two olefin groups
  SITE 6: note = (S)-3-(2-amino-2-carboxyethyl)benzoic acid
  SITE 10: note = (S)-2-aminohexanedioic acid, useful for stapling/stapled with another amino acid residue comprising a side chain amino group to form a staple through the 5-carboxyl group
  SITE 11: note (S)-3-amino-1-((pent-4-en-1-yloxy)carbonyl)pyrrolidine-3-ca rboxylic acid, useful for stapling/stapled with another amino acid residue comprising an olefin group to form a staple through the olefin group
  SITE 12: note = (S)-2-amino-3-(2-(trifluoromethyl)phenyl)propanoic acid
  SITE 13: note = (S)-2-amino-3-(benzo[b]thiophen-3-yl)propanoic acid
  SITE 14: note = (S)-2-amino-3-(piperidin-4-yl)propanoic acid, useful for stapling/stapled with another amino acid residue comprising a side chain acid group to form a staple through the piperidinyl group
  SITE 15: note = C-term amino
XDXXDXAAFXXXXXA

SEQ ID NO: 219 - protein, 15 aa, synthetic construct
  SITE 1: note = N-term Acetic Acid
  SITE 1: note = (R)-2-allylpyrrolidine-2-carboxylic acid, useful for stapling/stapled with another amino acid residue comprising an olefin group to form a staple through the olefin group
  SITE 3: note = (S)-2-amino-4,4-dimethylpentanoic acid
  VARIANT 4: note = 2-amino-2-(pent-4-en-1-yl)hept-6-enoic acid, useful for stapling/stapled with another amino acid residue comprising an olefin group to form a staple through one of the two olefin groups and/or with another amino acid residue comprising an olefin group to form a staple through the other of the two olefin groups
  SITE 6: note = (S)-3-(2-amino-2-carboxyethyl)benzoic acid
  SITE 7: note = 2-amino-2-methylpropanoic acid
  SITE 10: note = (S)-2-amino-6-(1H-1,2,3-triazol-1-yl)hexanoic acid, useful for stapling/stapled with another amino acid residue to form a staple through the 4-position of the triazolyl group
  SITE 11: note (S)-3-amino-1-((pent-4-en-1-yloxy)carbonyl)pyrrolidine-3-ca rboxylic acid, useful for stapling/stapled with another amino acid residue comprising an olefin group to form a staple through the olefin group
  SITE 12: note = (S)-2-amino-3-(thiophen-3-yl)propanoic acid
  SITE 13: note = (S)-2-amino-3-(benzo[b]thiophen-3-yl)propanoic acid
  SITE 14: note = O-methyl-L-serine, useful for stapling/stapled with another amino acid residue comprising a triazolyl group to form a staple through the terminal methyl group
  SITE 15: note = C-term amino
XDXXDXXAFXXXXSA

SEQ ID NO: 220 - protein, 15 aa, synthetic construct
  SITE 1: note = N-term Acetic Acid
  SITE 1: note = (R)-2-allylpyrrolidine-2-carboxylic acid, useful for stapling/stapled with another amino acid residue comprising an olefin group to form a staple through the olefin group
  SITE 3: note = (S)-2-amino-4,4-dimethylpentanoic acid
  VARIANT 4: note = 2-amino-2-(pent-4-en-1-yl)hept-6-enoic acid, useful for stapling/stapled with another amino acid residue comprising an olefin group to form a staple through one of the two olefin groups and/or with another amino acid residue comprising an olefin group to form a staple through the other of the two olefin groups
  SITE 6: note = (S)-3-(2-amino-2-carboxyethyl)benzoic acid
  SITE 7: note = 2-amino-2-methylpropanoic acid
  SITE 10: note = O-methyl-L-serine, useful for stapling/stapled with another amino acid residue comprising a triazolyl group to form a staple through the terminal methyl group
  SITE 11: note (S)-3-amino-1-((pent-4-en-1-yloxy)carbonyl)pyrrolidine-3-ca rboxylic acid, useful for stapling/stapled with another amino acid residue comprising an olefin group to form a staple through the olefin group
  SITE 12: note = (S)-2-amino-3-(thiophen-3-yl)propanoic acid
  SITE 13: note = (S)-2-amino-3-(benzo[b]thiophen-3-yl)propanoic acid
  SITE 14: note = (S)-2-amino-6-(1H-1,2,3-triazol-1-yl)hexanoic acid, useful for stapling/stapled with another amino acid residue to form a staple through the 4-position of the triazolyl group
  SITE 15: note = C-term amino
XDXXDXXAFSXXXXA

SEQ ID NO: 221 - protein, 15 aa, synthetic construct
  SITE 1: note = N-term Acetic Acid
  SITE 1: note = (R)-2-allylpyrrolidine-2-carboxylic acid, useful for stapling/stapled with another amino acid residue comprising an olefin group to form a staple through the olefin group
  SITE 3: note = (S)-2-amino-4,4-dimethylpentanoic acid
  VARIANT 4: note = 2-amino-2-(pent-4-en-1-yl)hept-6-enoic acid, useful for stapling/stapled with another amino acid residue comprising an olefin group to form a staple through one of the two olefin groups and/or with another amino acid residue comprising an olefin group to form a staple through the other of the two olefin groups
  SITE 6: note = (S)-3-(2-amino-2-carboxyethyl)benzoic acid
  SITE 10: note = (S)-2-amino-6-(1H-1,2,3-triazol-1-yl)hexanoic acid, useful for stapling/stapled with another amino acid residue to form a staple through the 4-position of the triazolyl group
  SITE 11: note (S)-3-amino-1-((pent-4-en-1-yloxy)carbonyl)pyrrolidine-3-ca rboxylic acid, useful for stapling/stapled with another amino acid residue comprising an olefin group to form a staple through the olefin group
  SITE 12: note = (S)-2-amino-3-(thiophen-3-yl)propanoic acid
  SITE 13: note = (S)-2-amino-3-(benzo[b]thiophen-3-yl)propanoic acid
  SITE 14: note = O-methyl-L-serine, useful for stapling/stapled with another amino acid residue comprising a triazolyl group to form a staple through the terminal methyl group
  SITE 15: note = C-term amino
XDXXDXAAFXXXXSA

SEQ ID NO: 222 - protein, 15 aa, synthetic construct
  SITE 1: note = N-term Acetic Acid
  SITE 1: note = (R)-2-allylpyrrolidine-2-carboxylic acid, useful for stapling/stapled with another amino acid residue comprising an olefin group to form a staple through the olefin group
  SITE 3: note = (S)-2-amino-4,4-dimethylpentanoic acid
  VARIANT 4: note = 2-amino-2-(pent-4-en-1-yl)hept-6-enoic acid, useful for stapling/stapled with another amino acid residue comprising an olefin group to form a staple through one of the two olefin groups and/or with another amino acid residue comprising an olefin group to form a staple through the other of the two olefin groups
  SITE 6: note = (S)-3-(2-amino-2-carboxyethyl)benzoic acid
  SITE 10: note = O-methyl-L-serine, useful for stapling/stapled with another amino acid residue comprising a triazolyl group to form a staple through the terminal methyl group
  SITE 11: note (S)-3-amino-1-((pent-4-en-1-yloxy)carbonyl)pyrrolidine-3-ca rboxylic acid, useful for stapling/stapled with another amino acid residue comprising an olefin group to form a staple through the olefin group
  SITE 12: note = (S)-2-amino-3-(thiophen-3-yl)propanoic acid
  SITE 13: note = (S)-2-amino-3-(benzo[b]thiophen-3-yl)propanoic acid
  SITE 14: note = (S)-2-amino-6-(1H-1,2,3-triazol-1-yl)hexanoic acid, useful for stapling/stapled with another amino acid residue to form a staple through the 4-position of the triazolyl group
  SITE 15: note = C-term amino
XDXXDXAAFSXXXXA

SEQ ID NO: 223 - protein, 15 aa, synthetic construct
  SITE 1: note = N-term Acetic Acid
  SITE 1: note = (R)-2-allylpyrrolidine-2-carboxylic acid, useful for stapling/stapled with another amino acid residue comprising an olefin group to form a staple through the olefin group
  SITE 3: note = (S)-2-amino-4,4-dimethylpentanoic acid
  VARIANT 4: note = 2-amino-2-(pent-4-en-1-yl)hept-6-enoic acid, useful for stapling/stapled with another amino acid residue comprising an olefin group to form a staple through one of the two olefin groups and/or with another amino acid residue comprising an olefin group to form a staple through the other of the two olefin groups
  SITE 6: note = (S)-3-(2-amino-2-carboxyethyl)benzoic acid
  SITE 7: note = 2-amino-2-methylpropanoic acid
  SITE 10: note = L-lysine, useful for stapling/stapled with another amino acid residue comprising a side chain acid group to form a staple through the 6-amino group
  SITE 11: note (S)-3-amino-1-((pent-4-en-1-yloxy)carbonyl)pyrrolidine-3-ca rboxylic acid, useful for stapling/stapled with another amino acid residue comprising an olefin group to form a staple through the olefin group
  SITE 13: note = (S)-2-amino-3-(benzo[b]thiophen-3-yl)propanoic acid
  SITE 14: note = L-glutamic acid, useful for stapling/stapled with another amino acid residue comprising a side chain amino group to form a staple through the 4-carboxyl group
  SITE 15: note = C-term amino
XDXXDXXAFKXAXEA

SEQ ID NO: 224 - protein, 15 aa, synthetic construct
  SITE 1: note = N-term Acetic Acid
  SITE 1: note = (R)-2-allylpyrrolidine-2-carboxylic acid, useful for stapling/stapled with another amino acid residue comprising an olefin group to form a staple through the olefin group
  SITE 3: note = (S)-2-amino-4,4-dimethylpentanoic acid
  VARIANT 4: note = 2-amino-2-(pent-4-en-1-yl)hept-6-enoic acid, useful for stapling/stapled with another amino acid residue comprising an olefin group to form a staple through one of the two olefin groups and/or with another amino acid residue comprising an olefin group to form a staple through the other of the two olefin groups
  SITE 6: note = (S)-3-(2-amino-2-carboxyethyl)benzoic acid
  SITE 7: note = 2-amino-2-methylpropanoic acid
  SITE 10: note = L-lysine, useful for stapling/stapled with another amino acid residue comprising a side chain acid group to form a staple through the 6-amino group
  SITE 11: note (S)-3-amino-1-((pent-4-en-1-yloxy)carbonyl)pyrrolidine-3-ca rboxylic acid, useful for stapling/stapled with another amino acid residue comprising an olefin group to form a staple through the olefin group
  SITE 12: note = (S)-2-aminobutanoic acid
  SITE 13: note = (S)-2-amino-3-(benzo[b]thiophen-3-yl)propanoic acid
  SITE 14: note = L-glutamic acid, useful for stapling/stapled with another amino acid residue comprising a side chain amino group to form a staple through the 4-carboxyl group
  SITE 15: note = C-term amino
XDXXDXXAFKXXXEA

SEQ ID NO: 225 - protein, 15 aa, synthetic construct
  SITE 1: note = N-term Acetic Acid
  SITE 1: note = (R)-2-allylpyrrolidine-2-carboxylic acid, useful for stapling/stapled with another amino acid residue comprising an olefin group to form a staple through the olefin group
  SITE 3: note = (S)-2-amino-4,4-dimethylpentanoic acid
  VARIANT 4: note = 2-amino-2-(pent-4-en-1-yl)hept-6-enoic acid, useful for stapling/stapled with another amino acid residue comprising an olefin group to form a staple through one of the two olefin groups and/or with another amino acid residue comprising an olefin group to form a staple through the other of the two olefin groups
  SITE 6: note = (S)-3-(2-amino-2-carboxyethyl)benzoic acid
  SITE 7: note = 2-amino-2-methylpropanoic acid
  SITE 10: note = L-lysine, useful for stapling/stapled with another amino acid residue comprising a side chain acid group to form a staple through the 6-amino group
  SITE 11: note (S)-3-amino-1-((pent-4-en-1-yloxy)carbonyl)pyrrolidine-3-ca rboxylic acid, useful for stapling/stapled with another amino acid residue comprising an olefin group to form a staple through the olefin group
  SITE 12: note = (S)-2-aminopentanoic acid
  SITE 13: note = (S)-2-amino-3-(benzo[b]thiophen-3-yl)propanoic acid
  SITE 14: note = L-glutamic acid, useful for stapling/stapled with another amino acid residue comprising a side chain amino group to form a staple through the 4-carboxyl group
  SITE 15: note = C-term amino
XDXXDXXAFKXXXEA

SEQ ID NO: 226 - protein, 15 aa, synthetic construct
  SITE 1: note = N-term Acetic Acid
  SITE 1: note = (R)-2-allylpyrrolidine-2-carboxylic acid, useful for stapling/stapled with another amino acid residue comprising an olefin group to form a staple through the olefin group
  SITE 3: note = (S)-2-amino-4,4-dimethylpentanoic acid
  VARIANT 4: note = 2-amino-2-(pent-4-en-1-yl)hept-6-enoic acid, useful for stapling/stapled with another amino acid residue comprising an olefin group to form a staple through one of the two olefin groups and/or with another amino acid residue comprising an olefin group to form a staple through the other of the two olefin groups
  SITE 6: note = (S)-3-(2-amino-2-carboxyethyl)benzoic acid
  SITE 7: note = 2-amino-2-methylpropanoic acid
  SITE 10: note = L-lysine, useful for stapling/stapled with another amino acid residue comprising a side chain acid group to form a staple through the 6-amino group
  SITE 11: note (S)-3-amino-1-((pent-4-en-1-yloxy)carbonyl)pyrrolidine-3-ca rboxylic acid, useful for stapling/stapled with another amino acid residue comprising an olefin group to form a staple through the olefin group
  SITE 12: note = (S)-2-aminohexanoic acid
  SITE 13: note = (S)-2-amino-3-(benzo[b]thiophen-3-yl)propanoic acid
  SITE 14: note = L-glutamic acid, useful for stapling/stapled with another amino acid residue comprising a side chain amino group to form a staple through the 4-carboxyl group
  SITE 15: note = C-term amino
XDXXDXXAFKXXXEA

SEQ ID NO: 227 - protein, 15 aa, synthetic construct
  SITE 1: note = N-term Acetic Acid
  SITE 1: note = (R)-2-allylpyrrolidine-2-carboxylic acid, useful for stapling/stapled with another amino acid residue comprising an olefin group to form a staple through the olefin group
  SITE 3: note = (S)-2-amino-4,4-dimethylpentanoic acid
  VARIANT 4: note = 2-amino-2-(pent-4-en-1-yl)hept-6-enoic acid, useful for stapling/stapled with another amino acid residue comprising an olefin group to form a staple through one of the two olefin groups and/or with another amino acid residue comprising an olefin group to form a staple through the other of the two olefin groups
  SITE 6: note = (S)-3-(2-amino-2-carboxyethyl)benzoic acid
  SITE 7: note = 2-amino-2-methylpropanoic acid
  SITE 10: note = L-lysine, useful for stapling/stapled with another amino acid residue comprising a side chain acid group to form a staple through the 6-amino group
  SITE 11: note (S)-3-amino-1-((pent-4-en-1-yloxy)carbonyl)pyrrolidine-3-ca rboxylic acid, useful for stapling/stapled with another amino acid residue comprising an olefin group to form a staple through the olefin group
  SITE 13: note = (S)-2-amino-3-(benzo[b]thiophen-3-yl)propanoic acid
  SITE 14: note = L-glutamic acid, useful for stapling/stapled with another amino acid residue comprising a side chain amino group to form a staple through the 4-carboxyl group
  SITE 15: note = C-term amino
XDXXDXXAFKXLXEA

SEQ ID NO: 228 - protein, 15 aa, synthetic construct
  SITE 1: note = N-term Acetic Acid
  SITE 1: note = (R)-2-allylpyrrolidine-2-carboxylic acid, useful for stapling/stapled with another amino acid residue comprising an olefin group to form a staple through the olefin group
  SITE 3: note = (S)-2-amino-4,4-dimethylpentanoic acid
  VARIANT 4: note = 2-amino-2-(pent-4-en-1-yl)hept-6-enoic acid, useful for stapling/stapled with another amino acid residue comprising an olefin group to form a staple through one of the two olefin groups and/or with another amino acid residue comprising an olefin group to form a staple through the other of the two olefin groups
  SITE 6: note = (S)-3-(2-amino-2-carboxyethyl)benzoic acid
  SITE 7: note = 2-amino-2-methylpropanoic acid
  SITE 10: note = L-lysine, useful for stapling/stapled with another amino acid residue comprising a side chain acid group to form a staple through the 6-amino group
  SITE 11: note (S)-3-amino-1-((pent-4-en-1-yloxy)carbonyl)pyrrolidine-3-ca rboxylic acid, useful for stapling/stapled with another amino acid residue comprising an olefin group to form a staple through the olefin group
  SITE 12: note = (S)-2-amino-5-methylhexanoic acid
  SITE 13: note = (S)-2-amino-3-(benzo[b]thiophen-3-yl)propanoic acid
  SITE 14: note = L-glutamic acid, useful for stapling/stapled with another amino acid residue comprising a side chain amino group to form a staple through the 4-carboxyl group
  SITE 15: note = C-term amino
XDXXDXXAFKXXXEA

SEQ ID NO: 229 - protein, 15 aa, synthetic construct
  SITE 1: note = N-term Acetic Acid
  SITE 1: note = (R)-2-allylpyrrolidine-2-carboxylic acid, useful for stapling/stapled with another amino acid residue comprising an olefin group to form a staple through the olefin group
  SITE 3: note = (S)-2-amino-4,4-dimethylpentanoic acid
  VARIANT 4: note = 2-amino-2-(pent-4-en-1-yl)hept-6-enoic acid, useful for stapling/stapled with another amino acid residue comprising an olefin group to form a staple through one of the two olefin groups and/or with another amino acid residue comprising an olefin group to form a staple through the other of the two olefin groups
  SITE 6: note = (S)-3-(2-amino-2-carboxyethyl)benzoic acid
  SITE 7: note = 2-amino-2-methylpropanoic acid
  SITE 10: note = L-lysine, useful for stapling/stapled with another amino acid residue comprising a side chain acid group to form a staple through the 6-amino group
  SITE 11: note (S)-3-amino-1-((pent-4-en-1-yloxy)carbonyl)pyrrolidine-3-ca rboxylic acid, useful for stapling/stapled with another amino acid residue comprising an olefin group to form a staple through the olefin group
  SITE 12: note = (S)-2-amino-4,4-dimethylpentanoic acid
  SITE 13: note = (S)-2-amino-3-(benzo[b]thiophen-3-yl)propanoic acid
  SITE 14: note = L-glutamic acid, useful for stapling/stapled with another amino acid residue comprising a side chain amino group to form a staple through the 4-carboxyl group
  SITE 15: note = C-term amino
XDXXDXXAFKXXXEA

SEQ ID NO: 230 - protein, 15 aa, synthetic construct
  SITE 1: note = N-term Acetic Acid
  SITE 1: note = (R)-2-allylpyrrolidine-2-carboxylic acid, useful for stapling/stapled with another amino acid residue comprising an olefin group to form a staple through the olefin group
  SITE 3: note = (S)-2-amino-4,4-dimethylpentanoic acid
  VARIANT 4: note = 2-amino-2-(pent-4-en-1-yl)hept-6-enoic acid, useful for stapling/stapled with another amino acid residue comprising an olefin group to form a staple through one of the two olefin groups and/or with another amino acid residue comprising an olefin group to form a staple through the other of the two olefin groups
  SITE 6: note = (S)-3-(2-amino-2-carboxyethyl)benzoic acid
  SITE 7: note = 2-amino-2-methylpropanoic acid
  SITE 10: note = L-lysine, useful for stapling/stapled with another amino acid residue comprising a side chain acid group to form a staple through the 6-amino group
  SITE 11: note (S)-3-amino-1-((pent-4-en-1-yloxy)carbonyl)pyrrolidine-3-ca rboxylic acid, useful for stapling/stapled with another amino acid residue comprising an olefin group to form a staple through the olefin group
  SITE 13: note = (S)-2-amino-3-(benzo[b]thiophen-3-yl)propanoic acid
  SITE 14: note = L-glutamic acid, useful for stapling/stapled with another amino acid residue comprising a side chain amino group to form a staple through the 4-carboxyl group
  SITE 15: note = C-term amino
XDXXDXXAFKXFXEA

SEQ ID NO: 231 - protein, 15 aa, synthetic construct
  SITE 1: note = N-term Acetic Acid
  SITE 1: note = (R)-2-allylpyrrolidine-2-carboxylic acid, useful for stapling/stapled with another amino acid residue comprising an olefin group to form a staple through the olefin group
  SITE 3: note = (S)-2-amino-4,4-dimethylpentanoic acid
  VARIANT 4: note = 2-amino-2-(pent-4-en-1-yl)hept-6-enoic acid, useful for stapling/stapled with another amino acid residue comprising an olefin group to form a staple through one of the two olefin groups and/or with another amino acid residue comprising an olefin group to form a staple through the other of the two olefin groups
  SITE 6: note = (S)-3-(2-amino-2-carboxyethyl)benzoic acid
  SITE 7: note = 2-amino-2-methylpropanoic acid
  SITE 10: note = L-lysine, useful for stapling/stapled with another amino acid residue comprising a side chain acid group to form a staple through the 6-amino group
  SITE 11: note (S)-3-amino-1-((pent-4-en-1-yloxy)carbonyl)pyrrolidine-3-ca rboxylic acid, useful for stapling/stapled with another amino acid residue comprising an olefin group to form a staple through the olefin group
  SITE 12: note = (S)-2-amino-3-cyclopropylpropanoic acid
  SITE 13: note = (S)-2-amino-3-(benzo[b]thiophen-3-yl)propanoic acid
  SITE 14: note = L-glutamic acid, useful for stapling/stapled with another amino acid residue comprising a side chain amino group to form a staple through the 4-carboxyl group
  SITE 15: note = C-term amino
XDXXDXXAFKXXXEA

SEQ ID NO: 232 - protein, 15 aa, synthetic construct
  SITE 1: note = N-term Acetic Acid
  SITE 1: note = (R)-2-allylpyrrolidine-2-carboxylic acid, useful for stapling/stapled with another amino acid residue comprising an olefin group to form a staple through the olefin group
  SITE 3: note = (S)-2-amino-4,4-dimethylpentanoic acid
  VARIANT 4: note = 2-amino-2-(pent-4-en-1-yl)hept-6-enoic acid, useful for stapling/stapled with another amino acid residue comprising an olefin group to form a staple through one of the two olefin groups and/or with another amino acid residue comprising an olefin group to form a staple through the other of the two olefin groups
  SITE 6: note = (S)-3-(2-amino-2-carboxyethyl)benzoic acid
  SITE 7: note = 2-amino-2-methylpropanoic acid
  SITE 10: note = L-lysine, useful for stapling/stapled with another amino acid residue comprising a side chain acid group to form a staple through the 6-amino group
  SITE 11: note (S)-3-amino-1-((pent-4-en-1-yloxy)carbonyl)pyrrolidine-3-ca rboxylic acid, useful for stapling/stapled with another amino acid residue comprising an olefin group to form a staple through the olefin group
  SITE 12: note = (S)-2-amino-3-cyclobutylpropanoic acid
  SITE 13: note = (S)-2-amino-3-(benzo[b]thiophen-3-yl)propanoic acid
  SITE 14: note = L-glutamic acid, useful for stapling/stapled with another amino acid residue comprising a side chain amino group to form a staple through the 4-carboxyl group
  SITE 15: note = C-term amino
XDXXDXXAFKXXXEA

SEQ ID NO: 233 - protein, 15 aa, synthetic construct
  SITE 1: note = N-term Acetic Acid
  SITE 1: note = (R)-2-allylpyrrolidine-2-carboxylic acid, useful for stapling/stapled with another amino acid residue comprising an olefin group to form a staple through the olefin group
  SITE 3: note = (S)-2-amino-4,4-dimethylpentanoic acid
  VARIANT 4: note = 2-amino-2-(pent-4-en-1-yl)hept-6-enoic acid, useful for stapling/stapled with another amino acid residue comprising an olefin group to form a staple through one of the two olefin groups and/or with another amino acid residue comprising an olefin group to form a staple through the other of the two olefin groups
  SITE 6: note = (S)-3-(2-amino-2-carboxyethyl)benzoic acid
  SITE 7: note = 2-amino-2-methylpropanoic acid
  SITE 10: note = L-lysine, useful for stapling/stapled with another amino acid residue comprising a side chain acid group to form a staple through the 6-amino group
  SITE 11: note (S)-3-amino-1-((pent-4-en-1-yloxy)carbonyl)pyrrolidine-3-ca rboxylic acid, useful for stapling/stapled with another amino acid residue comprising an olefin group to form a staple through the olefin group
  SITE 12: note = (S)-2-amino-3-cyclopentylpropanoic acid
  SITE 13: note = (S)-2-amino-3-(benzo[b]thiophen-3-yl)propanoic acid
  SITE 14: note = L-glutamic acid, useful for stapling/stapled with another amino acid residue comprising a side chain amino group to form a staple through the 4-carboxyl group
  SITE 15: note = C-term amino
XDXXDXXAFKXXXEA

SEQ ID NO: 234 - protein, 15 aa, synthetic construct
  SITE 1: note = N-term Acetic Acid
  SITE 1: note = (R)-2-allylpyrrolidine-2-carboxylic acid, useful for stapling/stapled with another amino acid residue comprising an olefin group to form a staple through the olefin group
  SITE 3: note = (S)-2-amino-4,4-dimethylpentanoic acid
  VARIANT 4: note = 2-amino-2-(pent-4-en-1-yl)hept-6-enoic acid, useful for stapling/stapled with another amino acid residue comprising an olefin group to form a staple through one of the two olefin groups and/or with another amino acid residue comprising an olefin group to form a staple through the other of the two olefin groups
  SITE 6: note = (S)-3-(2-amino-2-carboxyethyl)benzoic acid
  SITE 7: note = 2-amino-2-methylpropanoic acid
  SITE 10: note = L-lysine, useful for stapling/stapled with another amino acid residue comprising a side chain acid group to form a staple through the 6-amino group
  SITE 11: note (S)-3-amino-1-((pent-4-en-1-yloxy)carbonyl)pyrrolidine-3-ca rboxylic acid, useful for stapling/stapled with another amino acid residue comprising an olefin group to form a staple through the olefin group
  SITE 12: note = (S)-2-amino-3-cyclohexylpropanoic acid
  SITE 13: note = (S)-2-amino-3-(benzo[b]thiophen-3-yl)propanoic acid
  SITE 14: note = L-glutamic acid, useful for stapling/stapled with another amino acid residue comprising a side chain amino group to form a staple through the 4-carboxyl group
  SITE 15: note = C-term amino
XDXXDXXAFKXXXEA

SEQ ID NO: 235 - protein, 15 aa, synthetic construct
  SITE 1: note = N-term Acetic Acid
  SITE 1: note = (R)-2-allylpyrrolidine-2-carboxylic acid, useful for stapling/stapled with another amino acid residue comprising an olefin group to form a staple through the olefin group
  SITE 3: note = (S)-2-amino-4,4-dimethylpentanoic acid
  VARIANT 4: note = 2-amino-2-(pent-4-en-1-yl)hept-6-enoic acid, useful for stapling/stapled with another amino acid residue comprising an olefin group to form a staple through one of the two olefin groups and/or with another amino acid residue comprising an olefin group to form a staple through the other of the two olefin groups
  SITE 5: note = (2S,3S)-2-amino-3-methylsuccinic acid
  SITE 6: note = (S)-3-(2-amino-2-carboxyethyl)benzoic acid
  SITE 7: note = 2-amino-2-methylpropanoic acid
  SITE 10: note = L-lysine, useful for stapling/stapled with another amino acid residue comprising a side chain acid group to form a staple through the 6-amino group
  SITE 11: note (S)-3-amino-1-((pent-4-en-1-yloxy)carbonyl)pyrrolidine-3-ca rboxylic acid, useful for stapling/stapled with another amino acid residue comprising an olefin group to form a staple through the olefin group
  SITE 12: note = (S)-2-amino-3-(2-(trifluoromethyl)phenyl)propanoic acid
  SITE 13: note = (S)-2-amino-3-(benzo[b]thiophen-3-yl)propanoic acid
  SITE 14: note = L-glutamic acid, useful for stapling/stapled with another amino acid residue comprising a side chain amino group to form a staple through the 4-carboxyl group
  SITE 15: note = C-term amino
XDXXXXXAFKXXXEA

SEQ ID NO: 236 - protein, 15 aa, synthetic construct
  SITE 1: note = N-term Acetic Acid
  SITE 1: note = (R)-2-allylpyrrolidine-2-carboxylic acid, useful for stapling/stapled with another amino acid residue comprising an olefin group to form a staple through the olefin group
  SITE 3: note = (S)-2-amino-4,4-dimethylpentanoic acid
  VARIANT 4: note = 2-amino-2-(pent-4-en-1-yl)hept-6-enoic acid, useful for stapling/stapled with another amino acid residue comprising an olefin group to form a staple through one of the two olefin groups and/or with another amino acid residue comprising an olefin group to form a staple through the other of the two olefin groups
  SITE 5: note = (2S,3R)-2-amino-3-methylsuccinic acid
  SITE 6: note = (S)-3-(2-amino-2-carboxyethyl)benzoic acid
  SITE 7: note = 2-amino-2-methylpropanoic acid
  SITE 10: note = L-lysine, useful for stapling/stapled with another amino acid residue comprising a side chain acid group to form a staple through the 6-amino group
  SITE 11: note (S)-3-amino-1-((pent-4-en-1-yloxy)carbonyl)pyrrolidine-3-ca rboxylic acid, useful for stapling/stapled with another amino acid residue comprising an olefin group to form a staple through the olefin group
  SITE 12: note = (S)-2-amino-3-(2-(trifluoromethyl)phenyl)propanoic acid
  SITE 13: note = (S)-2-amino-3-(benzo[b]thiophen-3-yl)propanoic acid
  SITE 14: note = L-glutamic acid, useful for stapling/stapled with another amino acid residue comprising a side chain amino group to form a staple through the 4-carboxyl group
  SITE 15: note = C-term amino
XDXXXXXAFKXXXEA

SEQ ID NO: 237 - protein, 15 aa, synthetic construct
  SITE 1: note = N-term Acetic Acid
  SITE 1: note = (R)-2-allylpyrrolidine-2-carboxylic acid, useful for stapling/stapled with another amino acid residue comprising an olefin group to form a staple through the olefin group
  SITE 2: note = (2S,3S)-2-amino-3-methylsuccinic acid
  SITE 3: note = (S)-2-amino-4,4-dimethylpentanoic acid
  VARIANT 4: note = 2-amino-2-(pent-4-en-1-yl)hept-6-enoic acid, useful for stapling/stapled with another amino acid residue comprising an olefin group to form a staple through one of the two olefin groups and/or with another amino acid residue comprising an olefin group to form a staple through the other of the two olefin groups
  SITE 6: note = (S)-3-(2-amino-2-carboxyethyl)benzoic acid
  SITE 7: note = 2-amino-2-methylpropanoic acid
  SITE 10: note = L-lysine, useful for stapling/stapled with another amino acid residue comprising a side chain acid group to form a staple through the 6-amino group
  SITE 11: note (S)-3-amino-1-((pent-4-en-1-yloxy)carbonyl)pyrrolidine-3-ca rboxylic acid, useful for stapling/stapled with another amino acid residue comprising an olefin group to form a staple through the olefin group
  SITE 12: note = (S)-2-amino-3-(2-(trifluoromethyl)phenyl)propanoic acid
  SITE 13: note = (S)-2-amino-3-(benzo[b]thiophen-3-yl)propanoic acid
  SITE 14: note = L-glutamic acid, useful for stapling/stapled with another amino acid residue comprising a side chain amino group to form a staple through the 4-carboxyl group
  SITE 15: note = C-term amino
XXXXDXXAFKXXXEA

SEQ ID NO: 238 - protein, 15 aa, synthetic construct
  SITE 1: note = N-term Acetic Acid
  SITE 1: note = (R)-2-allylpyrrolidine-2-carboxylic acid, useful for stapling/stapled with another amino acid residue comprising an olefin group to form a staple through the olefin group
  SITE 2: note = (2S,3R)-2-amino-3-methylsuccinic acid
  SITE 3: note = (S)-2-amino-4,4-dimethylpentanoic acid
  VARIANT 4: note = 2-amino-2-(pent-4-en-1-yl)hept-6-enoic acid, useful for stapling/stapled with another amino acid residue comprising an olefin group to form a staple through one of the two olefin groups and/or with another amino acid residue comprising an olefin group to form a staple through the other of the two olefin groups
  SITE 6: note = (S)-3-(2-amino-2-carboxyethyl)benzoic acid
  SITE 7: note = 2-amino-2-methylpropanoic acid
  SITE 10: note = L-lysine, useful for stapling/stapled with another amino acid residue comprising a side chain acid group to form a staple through the 6-amino group
  SITE 11: note (S)-3-amino-1-((pent-4-en-1-yloxy)carbonyl)pyrrolidine-3-ca rboxylic acid, useful for stapling/stapled with another amino acid residue comprising an olefin group to form a staple through the olefin group
  SITE 12: note = (S)-2-amino-3-(2-(trifluoromethyl)phenyl)propanoic acid
  SITE 13: note = (S)-2-amino-3-(benzo[b]thiophen-3-yl)propanoic acid
  SITE 14: note = L-glutamic acid, useful for stapling/stapled with another amino acid residue comprising a side chain amino group to form a staple through the 4-carboxyl group
  SITE 15: note = C-term amino
XXXXDXXAFKXXXEA

SEQ ID NO: 239 - protein, 15 aa, synthetic construct
  SITE 1: note = N-term Acetic Acid
  SITE 1: note = (R)-2-allylpyrrolidine-2-carboxylic acid, useful for stapling/stapled with another amino acid residue comprising an olefin group to form a staple through the olefin group
  SITE 2: note = (R)-2-amino-2-methylsuccinic acid
  SITE 3: note = (S)-2-amino-4,4-dimethylpentanoic acid
  VARIANT 4: note = 2-amino-2-(pent-4-en-1-yl)hept-6-enoic acid, useful for stapling/stapled with another amino acid residue comprising an olefin group to form a staple through one of the two olefin groups and/or with another amino acid residue comprising an olefin group to form a staple through the other of the two olefin groups
  SITE 6: note = (S)-3-(2-amino-2-carboxyethyl)benzoic acid
  SITE 7: note = 2-amino-2-methylpropanoic acid
  SITE 10: note = L-lysine, useful for stapling/stapled with another amino acid residue comprising a side chain acid group to form a staple through the 6-amino group
  SITE 11: note (S)-3-amino-1-((pent-4-en-1-yloxy)carbonyl)pyrrolidine-3-ca rboxylic acid, useful for stapling/stapled with another amino acid residue comprising an olefin group to form a staple through the olefin group
  SITE 12: note = (S)-2-amino-3-(2-(trifluoromethyl)phenyl)propanoic acid
  SITE 13: note = (S)-2-amino-3-(benzo[b]thiophen-3-yl)propanoic acid
  SITE 14: note = L-glutamic acid, useful for stapling/stapled with another amino acid residue comprising a side chain amino group to form a staple through the 4-carboxyl group
  SITE 15: note = C-term amino
XXXXDXXAFKXXXEA

SEQ ID NO: 240 - protein, 15 aa, synthetic construct
  SITE 1: note = N-term Acetic Acid
  SITE 1: note = (R)-2-allylpyrrolidine-2-carboxylic acid, useful for stapling/stapled with another amino acid residue comprising an olefin group to form a staple through the olefin group
  SITE 3: note = (S)-2-amino-4,4-dimethylpentanoic acid
  VARIANT 4: note = 2-amino-2-(pent-4-en-1-yl)hept-6-enoic acid, useful for stapling/stapled with another amino acid residue comprising an olefin group to form a staple through one of the two olefin groups and/or with another amino acid residue comprising an olefin group to form a staple through the other of the two olefin groups
  SITE 6: note = (S)-3-(2-amino-2-carboxyethyl)benzoic acid
  SITE 7: note = 2-amino-2-methylpropanoic acid
  SITE 10: note = L-lysine, useful for stapling/stapled with another amino acid residue comprising a side chain acid group to form a staple through the 6-amino group
  SITE 11: note (S)-3-amino-1-((pent-4-en-1-yloxy)carbonyl)pyrrolidine-3-ca rboxylic acid, useful for stapling/stapled with another amino acid residue comprising an olefin group to form a staple through the olefin group
  SITE 12: note = (S)-2-amino-3-(2-(trifluoromethyl)phenyl)propanoic acid
  SITE 13: note = (S)-2-amino-3-(benzo[b]thiophen-3-yl)propanoic acid
  SITE 14: note = L-glutamic acid, useful for stapling/stapled with another amino acid residue comprising a side chain amino group to form a staple through the 4-carboxyl group
  SITE 15: note = C-term amino
XEXXEXXAFKXXXEA

SEQ ID NO: 241 - protein, 15 aa, synthetic construct
  SITE 1: note = N-term Acetic Acid
  SITE 1: note = (R)-2-allylpyrrolidine-2-carboxylic acid, useful for stapling/stapled with another amino acid residue comprising an olefin group to form a staple through the olefin group
  SITE 3: note = (S)-2-amino-4,4-dimethylpentanoic acid
  VARIANT 4: note = 2-amino-2-(pent-4-en-1-yl)hept-6-enoic acid, useful for stapling/stapled with another amino acid residue comprising an olefin group to form a staple through one of the two olefin groups and/or with another amino acid residue comprising an olefin group to form a staple through the other of the two olefin groups
  SITE 6: note = (S)-3-(2-amino-2-carboxyethyl)benzoic acid
  SITE 7: note = 2-amino-2-methylpropanoic acid
  SITE 10: note = L-lysine, useful for stapling/stapled with another amino acid residue comprising a side chain acid group to form a staple through the 6-amino group
  SITE 11: note (S)-3-amino-1-((pent-4-en-1-yloxy)carbonyl)pyrrolidine-3-ca rboxylic acid, useful for stapling/stapled with another amino acid residue comprising an olefin group to form a staple through the olefin group
  SITE 12: note = (S)-2-amino-3-(furan-2-yl)propanoic acid
  SITE 13: note = (S)-2-amino-3-(benzo[b]thiophen-3-yl)propanoic acid
  SITE 14: note = L-glutamic acid, useful for stapling/stapled with another amino acid residue comprising a side chain amino group to form a staple through the 4-carboxyl group
  SITE 15: note = C-term amino
XDXXDXXAFKXXXEA

SEQ ID NO: 242 - protein, 15 aa, synthetic construct
  SITE 1: note = N-term Acetic Acid
  SITE 1: note = (R)-2-allylpyrrolidine-2-carboxylic acid, useful for stapling/stapled with another amino acid residue comprising an olefin group to form a staple through the olefin group
  SITE 3: note = (S)-2-amino-4,4-dimethylpentanoic acid
  VARIANT 4: note = 2-amino-2-(pent-4-en-1-yl)hept-6-enoic acid, useful for stapling/stapled with another amino acid residue comprising an olefin group to form a staple through one of the two olefin groups and/or with another amino acid residue comprising an olefin group to form a staple through the other of the two olefin groups
  SITE 6: note = (S)-3-(2-amino-2-carboxyethyl)benzoic acid
  SITE 7: note = 2-amino-2-methylpropanoic acid
  SITE 10: note = L-lysine, useful for stapling/stapled with another amino acid residue comprising a side chain acid group to form a staple through the 6-amino group
  SITE 11: note (S)-3-amino-1-((pent-4-en-1-yloxy)carbonyl)pyrrolidine-3-ca rboxylic acid, useful for stapling/stapled with another amino acid residue comprising an olefin group to form a staple through the olefin group
  SITE 12: note = (S)-2-amino-3-(2-methoxyphenyl)propanoic acid
  SITE 13: note = (S)-2-amino-3-(benzo[b]thiophen-3-yl)propanoic acid
  SITE 14: note = L-glutamic acid, useful for stapling/stapled with another amino acid residue comprising a side chain amino group to form a staple through the 4-carboxyl group
  SITE 15: note = C-term amino
XDXXDXXAFKXXXEA

SEQ ID NO: 243 - protein, 15 aa, synthetic construct
  SITE 1: note = N-term Acetic Acid
  SITE 1: note = (R)-2-allylpyrrolidine-2-carboxylic acid, useful for stapling/stapled with another amino acid residue comprising an olefin group to form a staple through the olefin group
  SITE 3: note = (S)-2-amino-4,4-dimethylpentanoic acid
  VARIANT 4: note = 2-amino-2-(pent-4-en-1-yl)hept-6-enoic acid, useful for stapling/stapled with another amino acid residue comprising an olefin group to form a staple through one of the two olefin groups and/or with another amino acid residue comprising an olefin group to form a staple through the other of the two olefin groups
  SITE 6: note = (S)-3-(2-amino-2-carboxyethyl)benzoic acid
  SITE 7: note = 2-amino-2-methylpropanoic acid
  SITE 10: note = L-lysine, useful for stapling/stapled with another amino acid residue comprising a side chain acid group to form a staple through the 6-amino group
  SITE 11: note (S)-3-amino-1-((pent-4-en-1-yloxy)carbonyl)pyrrolidine-3-ca rboxylic acid, useful for stapling/stapled with another amino acid residue comprising an olefin group to form a staple through the olefin group
  SITE 12: note = (S)-2-amino-3-(o-tolyl)propanoic acid
  SITE 13: note = (S)-2-amino-3-(benzo[b]thiophen-3-yl)propanoic acid
  SITE 14: note = L-glutamic acid, useful for stapling/stapled with another amino acid residue comprising a side chain amino group to form a staple through the 4-carboxyl group
  SITE 15: note = C-term amino
XDXXDXXAFKXXXEA

SEQ ID NO: 244 - protein, 15 aa, synthetic construct
  SITE 1: note = N-term Acetic Acid
  SITE 1: note = (R)-2-allylpyrrolidine-2-carboxylic acid, useful for stapling/stapled with another amino acid residue comprising an olefin group to form a staple through the olefin group
  SITE 3: note = (S)-2-amino-4,4-dimethylpentanoic acid
  VARIANT 4: note = 2-amino-2-(pent-4-en-1-yl)hept-6-enoic acid, useful for stapling/stapled with another amino acid residue comprising an olefin group to form a staple through one of the two olefin groups and/or with another amino acid residue comprising an olefin group to form a staple through the other of the two olefin groups
  SITE 6: note = (S)-3-(2-amino-2-carboxyethyl)benzoic acid
  SITE 7: note = 2-amino-2-methylpropanoic acid
  SITE 10: note = L-lysine, useful for stapling/stapled with another amino acid residue comprising a side chain acid group to form a staple through the 6-amino group
  SITE 11: note (S)-3-amino-1-((pent-4-en-1-yloxy)carbonyl)pyrrolidine-3-ca rboxylic acid, useful for stapling/stapled with another amino acid residue comprising an olefin group to form a staple through the olefin group
  SITE 12: note = (S)-2-amino-3-(2-bromophenyl)propanoic acid
  SITE 13: note = (S)-2-amino-3-(benzo[b]thiophen-3-yl)propanoic acid
  SITE 14: note = L-glutamic acid, useful for stapling/stapled with another amino acid residue comprising a side chain amino group to form a staple through the 4-carboxyl group
  SITE 15: note = C-term amino
XDXXDXXAFKXXXEA

SEQ ID NO: 245 - protein, 15 aa, synthetic construct
  SITE 1: note = N-term Acetic Acid
  SITE 1: note = (R)-2-allylpyrrolidine-2-carboxylic acid, useful for stapling/stapled with another amino acid residue comprising an olefin group to form a staple through the olefin group
  SITE 3: note = (S)-2-amino-4,4-dimethylpentanoic acid
  VARIANT 4: note = 2-amino-2-(pent-4-en-1-yl)hept-6-enoic acid, useful for stapling/stapled with another amino acid residue comprising an olefin group to form a staple through one of the two olefin groups and/or with another amino acid residue comprising an olefin group to form a staple through the other of the two olefin groups
  SITE 6: note = (S)-3-(2-amino-2-carboxyethyl)benzoic acid
  SITE 7: note = 2-amino-2-methylpropanoic acid
  SITE 10: note = L-lysine, useful for stapling/stapled with another amino acid residue comprising a side chain acid group to form a staple through the 6-amino group
  SITE 11: note (S)-3-amino-1-((pent-4-en-1-yloxy)carbonyl)pyrrolidine-3-ca rboxylic acid, useful for stapling/stapled with another amino acid residue comprising an olefin group to form a staple through the olefin group
  SITE 12: note = (S)-2-amino-3-(2-chlorophenyl)propanoic acid
  SITE 13: note = (S)-2-amino-3-(benzo[b]thiophen-3-yl)propanoic acid
  SITE 14: note = L-glutamic acid, useful for stapling/stapled with another amino acid residue comprising a side chain amino group to form a staple through the 4-carboxyl group
  SITE 15: note = C-term amino
XDXXDXXAFKXXXEA

SEQ ID NO: 246 - protein, 15 aa, synthetic construct
  SITE 1: note = N-term Acetic Acid
  SITE 1: note = (R)-2-allylpyrrolidine-2-carboxylic acid, useful for stapling/stapled with another amino acid residue comprising an olefin group to form a staple through the olefin group
  SITE 3: note = (S)-2-amino-4,4-dimethylpentanoic acid
  VARIANT 4: note = 2-amino-2-(pent-4-en-1-yl)hept-6-enoic acid, useful for stapling/stapled with another amino acid residue comprising an olefin group to form a staple through one of the two olefin groups and/or with another amino acid residue comprising an olefin group to form a staple through the other of the two olefin groups
  SITE 6: note = (S)-3-(2-amino-2-carboxyethyl)benzoic acid
  SITE 7: note = 2-amino-2-methylpropanoic acid
  SITE 10: note = L-lysine, useful for stapling/stapled with another amino acid residue comprising a side chain acid group to form a staple through the 6-amino group
  SITE 11: note (S)-3-amino-1-((pent-4-en-1-yloxy)carbonyl)pyrrolidine-3-ca rboxylic acid, useful for stapling/stapled with another amino acid residue comprising an olefin group to form a staple through the olefin group
  SITE 12: note = (S)-2-amino-3-(2-cyanophenyl)propanoic acid
  SITE 13: note = (S)-2-amino-3-(benzo[b]thiophen-3-yl)propanoic acid
  SITE 14: note = L-glutamic acid, useful for stapling/stapled with another amino acid residue comprising a side chain amino group to form a staple through the 4-carboxyl group
  SITE 15: note = C-term amino
XDXXDXXAFKXXXEA

SEQ ID NO: 247 - protein, 15 aa, synthetic construct
  SITE 1: note = N-term Acetic Acid
  SITE 1: note = (R)-2-allylpyrrolidine-2-carboxylic acid, useful for stapling/stapled with another amino acid residue comprising an olefin group to form a staple through the olefin group
  SITE 3: note = (S)-2-amino-4,4-dimethylpentanoic acid
  VARIANT 4: note = 2-amino-2-(pent-4-en-1-yl)hept-6-enoic acid, useful for stapling/stapled with another amino acid residue comprising an olefin group to form a staple through one of the two olefin groups and/or with another amino acid residue comprising an olefin group to form a staple through the other of the two olefin groups
  SITE 6: note = (S)-3-(2-amino-2-carboxyethyl)benzoic acid
  SITE 7: note = 2-amino-2-methylpropanoic acid
  SITE 10: note = L-lysine, useful for stapling/stapled with another amino acid residue comprising a side chain acid group to form a staple through the 6-amino group
  SITE 11: note (S)-3-amino-1-((pent-4-en-1-yloxy)carbonyl)pyrrolidine-3-ca rboxylic acid, useful for stapling/stapled with another amino acid residue comprising an olefin group to form a staple through the olefin group
  SITE 12: note = (S)-2-amino-3-(2-nitrophenyl)propanoic acid
  SITE 13: note = (S)-2-amino-3-(benzo[b]thiophen-3-yl)propanoic acid
  SITE 14: note = L-glutamic acid, useful for stapling/stapled with another amino acid residue comprising a side chain amino group to form a staple through the 4-carboxyl group
  SITE 15: note = C-term amino
XDXXDXXAFKXXXEA

SEQ ID NO: 248 - protein, 15 aa, synthetic construct
  SITE 1: note = N-term Acetic Acid
  SITE 1: note = (R)-2-allylpyrrolidine-2-carboxylic acid, useful for stapling/stapled with another amino acid residue comprising an olefin group to form a staple through the olefin group
  SITE 3: note = (S)-2-amino-4,4-dimethylpentanoic acid
  VARIANT 4: note = 2-amino-2-(pent-4-en-1-yl)hept-6-enoic acid, useful for stapling/stapled with another amino acid residue comprising an olefin group to form a staple through one of the two olefin groups and/or with another amino acid residue comprising an olefin group to form a staple through the other of the two olefin groups
  SITE 6: note = (S)-3-(2-amino-2-carboxyethyl)benzoic acid
  SITE 7: note = 2-amino-2-methylpropanoic acid
  SITE 10: note = L-lysine, useful for stapling/stapled with another amino acid residue comprising a side chain acid group to form a staple through the 6-amino group
  SITE 11: note (S)-3-amino-1-((pent-4-en-1-yloxy)carbonyl)pyrrolidine-3-ca rboxylic acid, useful for stapling/stapled with another amino acid residue comprising an olefin group to form a staple through the olefin group
  SITE 12: note = (S)-2-amino-3-(pyridin-2-yl)propanoic acid
  SITE 13: note = (S)-2-amino-3-(benzo[b]thiophen-3-yl)propanoic acid
  SITE 14: note = L-glutamic acid, useful for stapling/stapled with another amino acid residue comprising a side chain amino group to form a staple through the 4-carboxyl group
  SITE 15: note = C-term amino
XDXXDXXAFKXXXEA

SEQ ID NO: 249 - protein, 15 aa, synthetic construct
  SITE 1: note = N-term Acetic Acid
  SITE 1: note = (R)-2-allylpyrrolidine-2-carboxylic acid, useful for stapling/stapled with another amino acid residue comprising an olefin group to form a staple through the olefin group
  SITE 3: note = (S)-2-amino-4,4-dimethylpentanoic acid
  VARIANT 4: note = 2-amino-2-(pent-4-en-1-yl)hept-6-enoic acid, useful for stapling/stapled with another amino acid residue comprising an olefin group to form a staple through one of the two olefin groups and/or with another amino acid residue comprising an olefin group to form a staple through the other of the two olefin groups
  SITE 6: note = (S)-3-(2-amino-2-carboxyethyl)benzoic acid
  SITE 7: note = 2-amino-2-methylpropanoic acid
  SITE 10: note = L-lysine, useful for stapling/stapled with another amino acid residue comprising a side chain acid group to form a staple through the 6-amino group
  SITE 11: note (S)-3-amino-1-((pent-4-en-1-yloxy)carbonyl)pyrrolidine-3-ca rboxylic acid, useful for stapling/stapled with another amino acid residue comprising an olefin group to form a staple through the olefin group
  SITE 12: note = (S)-2-amino-3-(pyridin-3-yl)propanoic acid
  SITE 13: note = (S)-2-amino-3-(benzo[b]thiophen-3-yl)propanoic acid
  SITE 14: note = L-glutamic acid, useful for stapling/stapled with another amino acid residue comprising a side chain amino group to form a staple through the 4-carboxyl group
  SITE 15: note = C-term amino
XDXXDXXAFKXXXEA

SEQ ID NO: 250 - protein, 15 aa, synthetic construct
  SITE 1: note = N-term Acetic Acid
  SITE 1: note = (R)-2-allylpyrrolidine-2-carboxylic acid, useful for stapling/stapled with another amino acid residue comprising an olefin group to form a staple through the olefin group
  SITE 3: note = (S)-2-amino-4,4-dimethylpentanoic acid
  VARIANT 4: note = 2-amino-2-(pent-4-en-1-yl)hept-6-enoic acid, useful for stapling/stapled with another amino acid residue comprising an olefin group to form a staple through one of the two olefin groups and/or with another amino acid residue comprising an olefin group to form a staple through the other of the two olefin groups
  SITE 6: note = (S)-3-(2-amino-2-carboxyethyl)benzoic acid
  SITE 7: note = 2-amino-2-methylpropanoic acid
  SITE 10: note = L-lysine, useful for stapling/stapled with another amino acid residue comprising a side chain acid group to form a staple through the 6-amino group
  SITE 11: note (S)-3-amino-1-((pent-4-en-1-yloxy)carbonyl)pyrrolidine-3-ca rboxylic acid, useful for stapling/stapled with another amino acid residue comprising an olefin group to form a staple through the olefin group
  SITE 12: note = (S)-2-amino-3-(pyridin-4-yl)propanoic acid
  SITE 13: note = (S)-2-amino-3-(benzo[b]thiophen-3-yl)propanoic acid
  SITE 14: note = L-glutamic acid, useful for stapling/stapled with another amino acid residue comprising a side chain amino group to form a staple through the 4-carboxyl group
  SITE 15: note = C-term amino
XDXXDXXAFKXXXEA

SEQ ID NO: 251 - protein, 15 aa, synthetic construct
  SITE 1: note = N-term Acetic Acid
  SITE 1: note = (R)-2-allylpyrrolidine-2-carboxylic acid, useful for stapling/stapled with another amino acid residue comprising an olefin group to form a staple through the olefin group
  SITE 3: note = (S)-2-amino-4,4-dimethylpentanoic acid
  VARIANT 4: note = 2-amino-2-(pent-4-en-1-yl)hept-6-enoic acid, useful for stapling/stapled with another amino acid residue comprising an olefin group to form a staple through one of the two olefin groups and/or with another amino acid residue comprising an olefin group to form a staple through the other of the two olefin groups
  SITE 6: note = (S)-3-(2-amino-2-carboxyethyl)benzoic acid
  SITE 7: note = 2-amino-2-methylpropanoic acid
  SITE 10: note = L-lysine, useful for stapling/stapled with another amino acid residue comprising a side chain acid group to form a staple through the 6-amino group
  SITE 11: note (S)-3-amino-1-((pent-4-en-1-yloxy)carbonyl)pyrrolidine-3-ca rboxylic acid, useful for stapling/stapled with another amino acid residue comprising an olefin group to form a staple through the olefin group
  SITE 13: note = (S)-2-amino-3-(benzo[b]thiophen-3-yl)propanoic acid
  SITE 14: note = L-glutamic acid, useful for stapling/stapled with another amino acid residue comprising a side chain amino group to form a staple through the 4-carboxyl group
  SITE 15: note = C-term amino
XDXXDXXAFKXHXEA

SEQ ID NO: 252 - protein, 15 aa, synthetic construct
  SITE 1: note = N-term Acetic Acid
  SITE 1: note = (R)-2-allylpyrrolidine-2-carboxylic acid, useful for stapling/stapled with another amino acid residue comprising an olefin group to form a staple through the olefin group
  SITE 3: note = (S)-2-amino-4,4-dimethylpentanoic acid
  VARIANT 4: note = 2-amino-2-(pent-4-en-1-yl)hept-6-enoic acid, useful for stapling/stapled with another amino acid residue comprising an olefin group to form a staple through one of the two olefin groups and/or with another amino acid residue comprising an olefin group to form a staple through the other of the two olefin groups
  SITE 6: note = (S)-3-(2-amino-2-carboxyethyl)benzoic acid
  SITE 7: note = 2-amino-2-methylpropanoic acid
  SITE 10: note = L-lysine, useful for stapling/stapled with another amino acid residue comprising a side chain acid group to form a staple through the 6-amino group
  SITE 11: note (S)-3-amino-1-((pent-4-en-1-yloxy)carbonyl)pyrrolidine-3-ca rboxylic acid, useful for stapling/stapled with another amino acid residue comprising an olefin group to form a staple through the olefin group
  SITE 12: note = (S)-2-amino-3-(2-(trifluoromethyl)phenyl)propanoic acid
  SITE 13: note = (S)-2-amino-3-(benzo[b]thiophen-3-yl)propanoic acid
  SITE 14: note = L-glutamic acid, useful for stapling/stapled with another amino acid residue comprising a side chain amino group to form a staple through the 4-carboxyl group
  SITE 15: note (S)-39-amino-5,33-dioxo-1-((3aS,4S,6aR)-2-oxohexahydro-1H-t hieno [3,4-d]imidazol-4-yl)-9,12,15,18,21,24,27,30-octaoxa-6,34- diazatetracontan-40-oic acid
  SITE 15: note = C-term amino
XDXXDXXAFKXXXEX

SEQ ID NO: 253 - protein, 15 aa, synthetic construct
  SITE 1: note = N-term Acetic Acid
  SITE 1: note = (R)-2-allylpyrrolidine-2-carboxylic acid, useful for stapling/stapled with another amino acid residue comprising an olefin group to form a staple through the olefin group
  VARIANT 4: note = 2-amino-2-(pent-4-en-1-yl)hept-6-enoic acid, useful for stapling/stapled with another amino acid residue comprising an olefin group to form a staple through one of the two olefin groups and/or with another amino acid residue comprising an olefin group to form a staple through the other of the two olefin groups
  SITE 6: note = (S)-3-(2-amino-2-carboxyethyl)benzoic acid
  SITE 7: note = 2-amino-2-methylpropanoic acid
  SITE 10: note = L-lysine, useful for stapling/stapled with another amino acid residue comprising a side chain acid group to form a staple through the 6-amino group
  SITE 11: note (S)-3-amino-1-((pent-4-en-1-yloxy)carbonyl)pyrrolidine-3-ca rboxylic acid, useful for stapling/stapled with another amino acid residue comprising an olefin group to form a staple through the olefin group
  SITE 12: note = (S)-2-amino-3-(thiophen-3-yl)propanoic acid
  SITE 13: note = (S)-2-amino-3-(benzo[b]thiophen-3-yl)propanoic acid
  SITE 14: note = L-glutamic acid, useful for stapling/stapled with another amino acid residue comprising a side chain amino group to form a staple through the 4-carboxyl group
  SITE 15: note = C-term amino
XDAXDXXAFKXXXEA

SEQ ID NO: 254 - protein, 15 aa, synthetic construct
  SITE 1: note = N-term Acetic Acid
  SITE 1: note = (R)-2-allylpyrrolidine-2-carboxylic acid, useful for stapling/stapled with another amino acid residue comprising an olefin group to form a staple through the olefin group
  VARIANT 4: note = 2-amino-2-(pent-4-en-1-yl)hept-6-enoic acid, useful for stapling/stapled with another amino acid residue comprising an olefin group to form a staple through one of the two olefin groups and/or with another amino acid residue comprising an olefin group to form a staple through the other of the two olefin groups
  SITE 6: note = (S)-3-(2-amino-2-carboxyethyl)benzoic acid
  SITE 7: note = 2-amino-2-methylpropanoic acid
  SITE 10: note = L-lysine, useful for stapling/stapled with another amino acid residue comprising a side chain acid group to form a staple through the 6-amino group
  SITE 11: note (S)-3-amino-1-((pent-4-en-1-yloxy)carbonyl)pyrrolidine-3-ca rboxylic acid, useful for stapling/stapled with another amino acid residue comprising an olefin group to form a staple through the olefin group
  SITE 12: note = (S)-2-amino-3-(thiophen-3-yl)propanoic acid
  SITE 13: note = (S)-2-amino-3-(benzo[b]thiophen-3-yl)propanoic acid
  SITE 14: note = L-glutamic acid, useful for stapling/stapled with another amino acid residue comprising a side chain amino group to form a staple through the 4-carboxyl group
  SITE 15: note = C-term amino
XDYXDXXAFKXXXEA

SEQ ID NO: 255 - protein, 15 aa, synthetic construct
  SITE 1: note = N-term Acetic Acid
  SITE 1: note = (R)-2-allylpyrrolidine-2-carboxylic acid, useful for stapling/stapled with another amino acid residue comprising an olefin group to form a staple through the olefin group
  VARIANT 4: note = 2-amino-2-(pent-4-en-1-yl)hept-6-enoic acid, useful for stapling/stapled with another amino acid residue comprising an olefin group to form a staple through one of the two olefin groups and/or with another amino acid residue comprising an olefin group to form a staple through the other of the two olefin groups
  SITE 6: note = (S)-3-(2-amino-2-carboxyethyl)benzoic acid
  SITE 7: note = 2-amino-2-methylpropanoic acid
  SITE 10: note = L-lysine, useful for stapling/stapled with another amino acid residue comprising a side chain acid group to form a staple through the 6-amino group
  SITE 11: note (S)-3-amino-1-((pent-4-en-1-yloxy)carbonyl)pyrrolidine-3-ca rboxylic acid, useful for stapling/stapled with another amino acid residue comprising an olefin group to form a staple through the olefin group
  SITE 12: note = (S)-2-amino-3-(thiophen-3-yl)propanoic acid
  SITE 13: note = (S)-2-amino-3-(benzo[b]thiophen-3-yl)propanoic acid
  SITE 14: note = L-glutamic acid, useful for stapling/stapled with another amino acid residue comprising a side chain amino group to form a staple through the 4-carboxyl group
  SITE 15: note = C-term amino
XDWXDXXAFKXXXEA

SEQ ID NO: 256 - protein, 15 aa, synthetic construct
  SITE 1: note = N-term Acetic Acid
  SITE 1: note = (R)-2-allylpyrrolidine-2-carboxylic acid, useful for stapling/stapled with another amino acid residue comprising an olefin group to form a staple through the olefin group
  VARIANT 4: note = 2-amino-2-(pent-4-en-1-yl)hept-6-enoic acid, useful for stapling/stapled with another amino acid residue comprising an olefin group to form a staple through one of the two olefin groups and/or with another amino acid residue comprising an olefin group to form a staple through the other of the two olefin groups
  SITE 6: note = (S)-3-(2-amino-2-carboxyethyl)benzoic acid
  SITE 7: note = 2-amino-2-methylpropanoic acid
  SITE 10: note = L-lysine, useful for stapling/stapled with another amino acid residue comprising a side chain acid group to form a staple through the 6-amino group
  SITE 11: note (S)-3-amino-1-((pent-4-en-1-yloxy)carbonyl)pyrrolidine-3-ca rboxylic acid, useful for stapling/stapled with another amino acid residue comprising an olefin group to form a staple through the olefin group
  SITE 12: note = (S)-2-amino-3-(thiophen-3-yl)propanoic acid
  SITE 13: note = (S)-2-amino-3-(benzo[b]thiophen-3-yl)propanoic acid
  SITE 14: note = L-glutamic acid, useful for stapling/stapled with another amino acid residue comprising a side chain amino group to form a staple through the 4-carboxyl group
  SITE 15: note = C-term amino
XDSXDXXAFKXXXEA

SEQ ID NO: 257 - protein, 15 aa, synthetic construct
  SITE 1: note = N-term Acetic Acid
  SITE 1: note = (R)-2-allylpyrrolidine-2-carboxylic acid, useful for stapling/stapled with another amino acid residue comprising an olefin group to form a staple through the olefin group
  SITE 3: note = 2-amino-2-methylpropanoic acid
  VARIANT 4: note = 2-amino-2-(pent-4-en-1-yl)hept-6-enoic acid, useful for stapling/stapled with another amino acid residue comprising an olefin group to form a staple through one of the two olefin groups and/or with another amino acid residue comprising an olefin group to form a staple through the other of the two olefin groups
  SITE 6: note = (S)-3-(2-amino-2-carboxyethyl)benzoic acid
  SITE 7: note = 2-amino-2-methylpropanoic acid
  SITE 10: note = L-lysine, useful for stapling/stapled with another amino acid residue comprising a side chain acid group to form a staple through the 6-amino group
  SITE 11: note (S)-3-amino-1-((pent-4-en-1-yloxy)carbonyl)pyrrolidine-3-ca rboxylic acid, useful for stapling/stapled with another amino acid residue comprising an olefin group to form a staple through the olefin group
  SITE 12: note = (S)-2-amino-3-(thiophen-3-yl)propanoic acid
  SITE 13: note = (S)-2-amino-3-(benzo[b]thiophen-3-yl)propanoic acid
  SITE 14: note = L-glutamic acid, useful for stapling/stapled with another amino acid residue comprising a side chain amino group to form a staple through the 4-carboxyl group
  SITE 15: note = C-term amino
XDXXDXXAFKXXXEA

SEQ ID NO: 258 - protein, 15 aa, synthetic construct
  SITE 1: note = N-term Acetic Acid
  SITE 1: note = (R)-2-allylpyrrolidine-2-carboxylic acid, useful for stapling/stapled with another amino acid residue comprising an olefin group to form a staple through the olefin group
  SITE 3: note = (S)-2-amino-2-phenylacetic acid
  VARIANT 4: note = 2-amino-2-(pent-4-en-1-yl)hept-6-enoic acid, useful for stapling/stapled with another amino acid residue comprising an olefin group to form a staple through one of the two olefin groups and/or with another amino acid residue comprising an olefin group to form a staple through the other of the two olefin groups
  SITE 6: note = (S)-3-(2-amino-2-carboxyethyl)benzoic acid
  SITE 7: note = 2-amino-2-methylpropanoic acid
  SITE 10: note = L-lysine, useful for stapling/stapled with another amino acid residue comprising a side chain acid group to form a staple through the 6-amino group
  SITE 11: note (S)-3-amino-1-((pent-4-en-1-yloxy)carbonyl)pyrrolidine-3-ca rboxylic acid, useful for stapling/stapled with another amino acid residue comprising an olefin group to form a staple through the olefin group
  SITE 12: note = (S)-2-amino-3-(thiophen-3-yl)propanoic acid
  SITE 13: note = (S)-2-amino-3-(benzo[b]thiophen-3-yl)propanoic acid
  SITE 14: note = L-glutamic acid, useful for stapling/stapled with another amino acid residue comprising a side chain amino group to form a staple through the 4-carboxyl group
  SITE 15: note = C-term amino
XDXXDXXAFKXXXEA

SEQ ID NO: 259 - protein, 15 aa, synthetic construct
  SITE 1: note = N-term Acetic Acid
  SITE 1: note = (R)-2-allylpyrrolidine-2-carboxylic acid, useful for stapling/stapled with another amino acid residue comprising an olefin group to form a staple through the olefin group
  SITE 3: note = (S)-2-amino-3,3-diphenylpropanoic acid
  VARIANT 4: note = 2-amino-2-(pent-4-en-1-yl)hept-6-enoic acid, useful for stapling/stapled with another amino acid residue comprising an olefin group to form a staple through one of the two olefin groups and/or with another amino acid residue comprising an olefin group to form a staple through the other of the two olefin groups
  SITE 6: note = (S)-3-(2-amino-2-carboxyethyl)benzoic acid
  SITE 7: note = 2-amino-2-methylpropanoic acid
  SITE 10: note = L-lysine, useful for stapling/stapled with another amino acid residue comprising a side chain acid group to form a staple through the 6-amino group
  SITE 11: note (S)-3-amino-1-((pent-4-en-1-yloxy)carbonyl)pyrrolidine-3-ca rboxylic acid, useful for stapling/stapled with another amino acid residue comprising an olefin group to form a staple through the olefin group
  SITE 12: note = (S)-2-amino-3-(thiophen-3-yl)propanoic acid
  SITE 13: note = (S)-2-amino-3-(benzo[b]thiophen-3-yl)propanoic acid
  SITE 14: note = L-glutamic acid, useful for stapling/stapled with another amino acid residue comprising a side chain amino group to form a staple through the 4-carboxyl group
  SITE 15: note = C-term amino
XDXXDXXAFKXXXEA

SEQ ID NO: 260 - protein, 15 aa, synthetic construct
  SITE 1: note = N-term Acetic Acid
  SITE 1: note = (R)-2-allylpyrrolidine-2-carboxylic acid, useful for stapling/stapled with another amino acid residue comprising an olefin group to form a staple through the olefin group
  SITE 3: note = (S)-2-aminodecanoic acid
  VARIANT 4: note = 2-amino-2-(pent-4-en-1-yl)hept-6-enoic acid, useful for stapling/stapled with another amino acid residue comprising an olefin group to form a staple through one of the two olefin groups and/or with another amino acid residue comprising an olefin group to form a staple through the other of the two olefin groups
  SITE 6: note = (S)-3-(2-amino-2-carboxyethyl)benzoic acid
  SITE 7: note = 2-amino-2-methylpropanoic acid
  SITE 10: note = L-lysine, useful for stapling/stapled with another amino acid residue comprising a side chain acid group to form a staple through the 6-amino group
  SITE 11: note (S)-3-amino-1-((pent-4-en-1-yloxy)carbonyl)pyrrolidine-3-ca rboxylic acid, useful for stapling/stapled with another amino acid residue comprising an olefin group to form a staple through the olefin group
  SITE 12: note = (S)-2-amino-3-(thiophen-3-yl)propanoic acid
  SITE 13: note = (S)-2-amino-3-(benzo[b]thiophen-3-yl)propanoic acid
  SITE 14: note = L-glutamic acid, useful for stapling/stapled with another amino acid residue comprising a side chain amino group to form a staple through the 4-carboxyl group
  SITE 15: note = C-term amino
XDXXDXXAFKXXXEA

SEQ ID NO: 261 - protein, 15 aa, synthetic construct
  SITE 1: note = N-term Acetic Acid
  SITE 1: note = (R)-2-allylpyrrolidine-2-carboxylic acid, useful for stapling/stapled with another amino acid residue comprising an olefin group to form a staple through the olefin group
  SITE 3: note = (S)-2-amino-3-cyclobutylpropanoic acid
  VARIANT 4: note = 2-amino-2-(pent-4-en-1-yl)hept-6-enoic acid, useful for stapling/stapled with another amino acid residue comprising an olefin group to form a staple through one of the two olefin groups and/or with another amino acid residue comprising an olefin group to form a staple through the other of the two olefin groups
  SITE 6: note = (S)-3-(2-amino-2-carboxyethyl)benzoic acid
  SITE 7: note = 2-amino-2-methylpropanoic acid
  SITE 10: note = L-lysine, useful for stapling/stapled with another amino acid residue comprising a side chain acid group to form a staple through the 6-amino group
  SITE 11: note (S)-3-amino-1-((pent-4-en-1-yloxy)carbonyl)pyrrolidine-3-ca rboxylic acid, useful for stapling/stapled with another amino acid residue comprising an olefin group to form a staple through the olefin group
  SITE 12: note = (S)-2-amino-3-(thiophen-3-yl)propanoic acid
  SITE 13: note = (S)-2-amino-3-(benzo[b]thiophen-3-yl)propanoic acid
  SITE 14: note = L-glutamic acid, useful for stapling/stapled with another amino acid residue comprising a side chain amino group to form a staple through the 4-carboxyl group
  SITE 15: note = C-term amino
XDXXDXXAFKXXXEA

SEQ ID NO: 262 - protein, 15 aa, synthetic construct
  SITE 1: note = N-term Acetic Acid
  SITE 1: note = (R)-2-allylpyrrolidine-2-carboxylic acid, useful for stapling/stapled with another amino acid residue comprising an olefin group to form a staple through the olefin group
  SITE 3: note = (S)-2-amino-5-morpholinopentanoic acid
  VARIANT 4: note = 2-amino-2-(pent-4-en-1-yl)hept-6-enoic acid, useful for stapling/stapled with another amino acid residue comprising an olefin group to form a staple through one of the two olefin groups and/or with another amino acid residue comprising an olefin group to form a staple through the other of the two olefin groups
  SITE 6: note = (S)-3-(2-amino-2-carboxyethyl)benzoic acid
  SITE 7: note = 2-amino-2-methylpropanoic acid
  SITE 10: note = L-lysine, useful for stapling/stapled with another amino acid residue comprising a side chain acid group to form a staple through the 6-amino group
  SITE 11: note (S)-3-amino-1-((pent-4-en-1-yloxy)carbonyl)pyrrolidine-3-ca rboxylic acid, useful for stapling/stapled with another amino acid residue comprising an olefin group to form a staple through the olefin group
  SITE 12: note = (S)-2-amino-3-(thiophen-3-yl)propanoic acid
  SITE 13: note = (S)-2-amino-3-(benzo[b]thiophen-3-yl)propanoic acid
  SITE 14: note = L-glutamic acid, useful for stapling/stapled with another amino acid residue comprising a side chain amino group to form a staple through the 4-carboxyl group
  SITE 15: note = C-term amino
XDXXDXXAFKXXXEA

SEQ ID NO: 263 - protein, 15 aa, synthetic construct
  SITE 1: note = N-term Acetic Acid
  SITE 1: note = (R)-2-allylpyrrolidine-2-carboxylic acid, useful for stapling/stapled with another amino acid residue comprising an olefin group to form a staple through the olefin group
  SITE 3: note = (S)-2-amino-5-(4,4-difluoropiperidin-1-yl)pentanoic acid
  VARIANT 4: note = 2-amino-2-(pent-4-en-1-yl)hept-6-enoic acid, useful for stapling/stapled with another amino acid residue comprising an olefin group to form a staple through one of the two olefin groups and/or with another amino acid residue comprising an olefin group to form a staple through the other of the two olefin groups
  SITE 6: note = (S)-3-(2-amino-2-carboxyethyl)benzoic acid
  SITE 7: note = 2-amino-2-methylpropanoic acid
  SITE 10: note = L-lysine, useful for stapling/stapled with another amino acid residue comprising a side chain acid group to form a staple through the 6-amino group
  SITE 11: note (S)-3-amino-1-((pent-4-en-1-yloxy)carbonyl)pyrrolidine-3-ca rboxylic acid, useful for stapling/stapled with another amino acid residue comprising an olefin group to form a staple through the olefin group
  SITE 12: note = (S)-2-amino-3-(thiophen-3-yl)propanoic acid
  SITE 13: note = (S)-2-amino-3-(benzo[b]thiophen-3-yl)propanoic acid
  SITE 14: note = L-glutamic acid, useful for stapling/stapled with another amino acid residue comprising a side chain amino group to form a staple through the 4-carboxyl group
  SITE 15: note = C-term amino
XDXXDXXAFKXXXEA

SEQ ID NO: 264 - protein, 15 aa, synthetic construct
  SITE 1: note = N-term Acetic Acid
  SITE 1: note = (R)-2-allylpyrrolidine-2-carboxylic acid, useful for stapling/stapled with another amino acid residue comprising an olefin group to form a staple through the olefin group
  SITE 3: note = (S)-2-amino-4,4-dimethylpentanoic acid
  VARIANT 4: note = 2-amino-2-(pent-4-en-1-yl)hept-6-enoic acid, useful for stapling/stapled with another amino acid residue comprising an olefin group to form a staple through one of the two olefin groups and/or with another amino acid residue comprising an olefin group to form a staple through the other of the two olefin groups
  SITE 6: note (S)-3-(1-(2-amino-2-carboxyethyl)-1H-1,2,3-triazol-4-yl)-2, 2- dimethylpropanoic acid
  SITE 7: note = 2-amino-2-methylpropanoic acid
  SITE 10: note = L-lysine, useful for stapling/stapled with another amino acid residue comprising a side chain acid group to form a staple through the 6-amino group
  SITE 11: note (S)-3-amino-1-((pent-4-en-1-yloxy)carbonyl)pyrrolidine-3-ca rboxylic acid, useful for stapling/stapled with another amino acid residue comprising an olefin group to form a staple through the olefin group
  SITE 12: note = (S)-2-amino-3-(thiophen-3-yl)propanoic acid
  SITE 13: note = (S)-2-amino-3-(benzo[b]thiophen-3-yl)propanoic acid
  SITE 14: note = L-glutamic acid, useful for stapling/stapled with another amino acid residue comprising a side chain amino group to form a staple through the 4-carboxyl group
  SITE 15: note = C-term amino
XNXXDXXAFKXXXEA

SEQ ID NO: 265 - protein, 15 aa, synthetic construct
  SITE 1: note = N-term Acetic Acid
  SITE 1: note = (R)-2-allylpyrrolidine-2-carboxylic acid, useful for stapling/stapled with another amino acid residue comprising an olefin group to form a staple through the olefin group
  SITE 3: note = (S)-2-amino-4,4-dimethylpentanoic acid
  VARIANT 4: note = 2-amino-2-(pent-4-en-1-yl)hept-6-enoic acid, useful for stapling/stapled with another amino acid residue comprising an olefin group to form a staple through one of the two olefin groups and/or with another amino acid residue comprising an olefin group to form a staple through the other of the two olefin groups
  SITE 6: note (S)-3-(1-(2-amino-2-carboxyethyl)-1H-1,2,3-triazol-4-yl)-2, 2- dimethylpropanoic acid
  SITE 7: note = 2-amino-2-methylpropanoic acid
  SITE 10: note = L-lysine, useful for stapling/stapled with another amino acid residue comprising a side chain acid group to form a staple through the 6-amino group
  SITE 11: note (S)-3-amino-1-((pent-4-en-1-yloxy)carbonyl)pyrrolidine-3-ca rboxylic acid, useful for stapling/stapled with another amino acid residue comprising an olefin group to form a staple through the olefin group
  SITE 12: note = (S)-2-amino-3-(thiophen-3-yl)propanoic acid
  SITE 13: note = (S)-2-amino-3-(benzo[b]thiophen-3-yl)propanoic acid
  SITE 14: note = L-glutamic acid, useful for stapling/stapled with another amino acid residue comprising a side chain amino group to form a staple through the 4-carboxyl group
  SITE 15: note = C-term amino
XSXXDXXAFKXXXEA

SEQ ID NO: 266 - protein, 15 aa, synthetic construct
  SITE 1: note = N-term Acetic Acid
  SITE 1: note = (R)-2-allylpyrrolidine-2-carboxylic acid, useful for stapling/stapled with another amino acid residue comprising an olefin group to form a staple through the olefin group
  SITE 2: note = L-allothreonine
  SITE 3: note = (S)-2-amino-4,4-dimethylpentanoic acid
  VARIANT 4: note = 2-amino-2-(pent-4-en-1-yl)hept-6-enoic acid, useful for stapling/stapled with another amino acid residue comprising an olefin group to form a staple through one of the two olefin groups and/or with another amino acid residue comprising an olefin group to form a staple through the other of the two olefin groups
  SITE 6: note (S)-3-(1-(2-amino-2-carboxyethyl)-1H-1,2,3-triazol-4-yl)-2, 2- dimethylpropanoic acid
  SITE 7: note = 2-amino-2-methylpropanoic acid
  SITE 10: note = L-lysine, useful for stapling/stapled with another amino acid residue comprising a side chain acid group to form a staple through the 6-amino group
  SITE 11: note (S)-3-amino-1-((pent-4-en-1-yloxy)carbonyl)pyrrolidine-3-ca rboxylic acid, useful for stapling/stapled with another amino acid residue comprising an olefin group to form a staple through the olefin group
  SITE 12: note = (S)-2-amino-3-(thiophen-3-yl)propanoic acid
  SITE 13: note = (S)-2-amino-3-(benzo[b]thiophen-3-yl)propanoic acid
  SITE 14: note = L-glutamic acid, useful for stapling/stapled with another amino acid residue comprising a side chain amino group to form a staple through the 4-carboxyl group
  SITE 15: note = C-term amino
XTXXDXXAFKXXXEA

SEQ ID NO: 267 - protein, 15 aa, synthetic construct
  SITE 1: note = N-term Acetic Acid
  SITE 1: note = (R)-2-allylpyrrolidine-2-carboxylic acid, useful for stapling/stapled with another amino acid residue comprising an olefin group to form a staple through the olefin group
  SITE 3: note = (S)-2-amino-4,4-dimethylpentanoic acid
  VARIANT 4: note = 2-amino-2-(pent-4-en-1-yl)hept-6-enoic acid, useful for stapling/stapled with another amino acid residue comprising an olefin group to form a staple through one of the two olefin groups and/or with another amino acid residue comprising an olefin group to form a staple through the other of the two olefin groups
  SITE 6: note (S)-3-(1-(2-amino-2-carboxyethyl)-1H-1,2,3-triazol-4-yl)-2, 2- dimethylpropanoic acid
  SITE 7: note = 2-amino-2-methylpropanoic acid
  SITE 10: note = L-lysine, useful for stapling/stapled with another amino acid residue comprising a side chain acid group to form a staple through the 6-amino group
  SITE 11: note (S)-3-amino-1-((pent-4-en-1-yloxy)carbonyl)pyrrolidine-3-ca rboxylic acid, useful for stapling/stapled with another amino acid residue comprising an olefin group to form a staple through the olefin group
  SITE 12: note = (S)-2-amino-3-(thiophen-3-yl)propanoic acid
  SITE 13: note = (S)-2-amino-3-(benzo[b]thiophen-3-yl)propanoic acid
  SITE 14: note = L-glutamic acid, useful for stapling/stapled with another amino acid residue comprising a side chain amino group to form a staple through the 4-carboxyl group
  SITE 15: note = C-term amino
XDXXNXXAFKXXXEA

SEQ ID NO: 268 - protein, 15 aa, synthetic construct
  SITE 1: note = N-term Acetic Acid
  SITE 1: note = (R)-2-allylpyrrolidine-2-carboxylic acid, useful for stapling/stapled with another amino acid residue comprising an olefin group to form a staple through the olefin group
  SITE 3: note = (S)-2-amino-4,4-dimethylpentanoic acid
  VARIANT 4: note = 2-amino-2-(pent-4-en-1-yl)hept-6-enoic acid, useful for stapling/stapled with another amino acid residue comprising an olefin group to form a staple through one of the two olefin groups and/or with another amino acid residue comprising an olefin group to form a staple through the other of the two olefin groups
  SITE 6: note (S)-3-(1-(2-amino-2-carboxyethyl)-1H-1,2,3-triazol-4-yl)-2, 2- dimethylpropanoic acid
  SITE 7: note = (S)-2-amino-5-morpholino-5-oxopentanoic acid
  SITE 10: note = L-lysine, useful for stapling/stapled with another amino acid residue comprising a side chain acid group to form a staple through the 6-amino group
  SITE 11: note (S)-3-amino-1-((pent-4-en-1-yloxy)carbonyl)pyrrolidine-3-ca rboxylic acid, useful for stapling/stapled with another amino acid residue comprising an olefin group to form a staple through the olefin group
  SITE 12: note = (S)-2-amino-3-(thiophen-3-yl)propanoic acid
  SITE 13: note = (S)-2-amino-3-(benzo[b]thiophen-3-yl)propanoic acid
  SITE 14: note = L-glutamic acid, useful for stapling/stapled with another amino acid residue comprising a side chain amino group to form a staple through the 4-carboxyl group
  SITE 15: note = C-term amino
XNXXDXXAFKXXXEA

SEQ ID NO: 269 - protein, 15 aa, synthetic construct
  SITE 1: note = N-term Acetic Acid
  SITE 1: note = (R)-2-allylpyrrolidine-2-carboxylic acid, useful for stapling/stapled with another amino acid residue comprising an olefin group to form a staple through the olefin group
  SITE 3: note = (S)-2-amino-4,4-dimethylpentanoic acid
  VARIANT 4: note = 2-amino-2-(pent-4-en-1-yl)hept-6-enoic acid, useful for stapling/stapled with another amino acid residue comprising an olefin group to form a staple through one of the two olefin groups and/or with another amino acid residue comprising an olefin group to form a staple through the other of the two olefin groups
  SITE 6: note (S)-3-(1-(2-amino-2-carboxyethyl)-1H-1,2,3-triazol-4-yl)-2, 2- dimethylpropanoic acid
  SITE 7: note = (S)-2-amino-5-morpholino-5-oxopentanoic acid
  SITE 10: note = L-lysine, useful for stapling/stapled with another amino acid residue comprising a side chain acid group to form a staple through the 6-amino group
  SITE 11: note (S)-3-amino-1-((pent-4-en-1-yloxy)carbonyl)pyrrolidine-3-ca rboxylic acid, useful for stapling/stapled with another amino acid residue comprising an olefin group to form a staple through the olefin group
  SITE 12: note = (S)-2-amino-3-(thiophen-3-yl)propanoic acid
  SITE 13: note = (S)-2-amino-3-(benzo[b]thiophen-3-yl)propanoic acid
  SITE 14: note = L-glutamic acid, useful for stapling/stapled with another amino acid residue comprising a side chain amino group to form a staple through the 4-carboxyl group
  SITE 15: note = C-term amino
XSXXDXXAFKXXXEA

SEQ ID NO: 270 - protein, 15 aa, synthetic construct
  SITE 1: note = N-term Acetic Acid
  SITE 1: note = (R)-2-allylpyrrolidine-2-carboxylic acid, useful for stapling/stapled with another amino acid residue comprising an olefin group to form a staple through the olefin group
  SITE 2: note = L-allothreonine
  SITE 3: note = (S)-2-amino-4,4-dimethylpentanoic acid
  VARIANT 4: note = 2-amino-2-(pent-4-en-1-yl)hept-6-enoic acid, useful for stapling/stapled with another amino acid residue comprising an olefin group to form a staple through one of the two olefin groups and/or with another amino acid residue comprising an olefin group to form a staple through the other of the two olefin groups
  SITE 6: note (S)-3-(1-(2-amino-2-carboxyethyl)-1H-1,2,3-triazol-4-yl)-2, 2- dimethylpropanoic acid
  SITE 7: note = (S)-2-amino-5-morpholino-5-oxopentanoic acid
  SITE 10: note = L-lysine, useful for stapling/stapled with another amino acid residue comprising a side chain acid group to form a staple through the 6-amino group
  SITE 11: note (S)-3-amino-1-((pent-4-en-1-yloxy)carbonyl)pyrrolidine-3-ca rboxylic acid, useful for stapling/stapled with another amino acid residue comprising an olefin group to form a staple through the olefin group
  SITE 12: note = (S)-2-amino-3-(thiophen-3-yl)propanoic acid
  SITE 13: note = (S)-2-amino-3-(benzo[b]thiophen-3-yl)propanoic acid
  SITE 14: note = L-glutamic acid, useful for stapling/stapled with another amino acid residue comprising a side chain amino group to form a staple through the 4-carboxyl group
  SITE 15: note = C-term amino
XTXXDXXAFKXXXEA

SEQ ID NO: 271 - protein, 15 aa, synthetic construct
  SITE 1: note = N-term Acetic Acid
  SITE 1: note = (R)-2-allylpyrrolidine-2-carboxylic acid, useful for stapling/stapled with another amino acid residue comprising an olefin group to form a staple through the olefin group
  SITE 3: note = (S)-2-amino-4,4-dimethylpentanoic acid
  VARIANT 4: note = 2-amino-2-(pent-4-en-1-yl)hept-6-enoic acid, useful for stapling/stapled with another amino acid residue comprising an olefin group to form a staple through one of the two olefin groups and/or with another amino acid residue comprising an olefin group to form a staple through the other of the two olefin groups
  SITE 6: note (S)-3-(1-(2-amino-2-carboxyethyl)-1H-1,2,3-triazol-4-yl)-2, 2- dimethylpropanoic acid
  SITE 7: note = (S)-2-amino-5-morpholino-5-oxopentanoic acid
  SITE 10: note = L-lysine, useful for stapling/stapled with another amino acid residue comprising a side chain acid group to form a staple through the 6-amino group
  SITE 11: note (S)-3-amino-1-((pent-4-en-1-yloxy)carbonyl)pyrrolidine-3-ca rboxylic acid, useful for stapling/stapled with another amino acid residue comprising an olefin group to form a staple through the olefin group
  SITE 12: note = (S)-2-amino-3-(thiophen-3-yl)propanoic acid
  SITE 13: note = (S)-2-amino-3-(benzo[b]thiophen-3-yl)propanoic acid
  SITE 14: note = L-glutamic acid, useful for stapling/stapled with another amino acid residue comprising a side chain amino group to form a staple through the 4-carboxyl group
  SITE 15: note = C-term amino
XDXXNXXAFKXXXEA

SEQ ID NO: 272 - protein, 15 aa, synthetic construct
  SITE 1: note = N-term Acetic Acid
  SITE 1: note = (R)-2-allylpyrrolidine-2-carboxylic acid, useful for stapling/stapled with another amino acid residue comprising an olefin group to form a staple through the olefin group
  SITE 3: note = (S)-2-amino-4,4-dimethylpentanoic acid
  VARIANT 4: note = 2-amino-2-(pent-4-en-1-yl)hept-6-enoic acid, useful for stapling/stapled with another amino acid residue comprising an olefin group to form a staple through one of the two olefin groups and/or with another amino acid residue comprising an olefin group to form a staple through the other of the two olefin groups
  SITE 6: note = (S)-3-(2-amino-2-carboxyethyl)benzoic acid
  SITE 7: note = (S)-2-amino-5-morpholino-5-oxopentanoic acid
  SITE 10: note = L-lysine, useful for stapling/stapled with another amino acid residue comprising a side chain acid group to form a staple through the 6-amino group
  SITE 11: note (S)-3-amino-1-((pent-4-en-1-yloxy)carbonyl)pyrrolidine-3-ca rboxylic acid, useful for stapling/stapled with another amino acid residue comprising an olefin group to form a staple through the olefin group
  SITE 12: note = (S)-2-amino-3-(thiophen-3-yl)propanoic acid
  SITE 13: note = (S)-2-amino-3-(benzo[b]thiophen-3-yl)propanoic acid
  SITE 14: note = L-glutamic acid, useful for stapling/stapled with another amino acid residue comprising a side chain amino group to form a staple through the 4-carboxyl group
  SITE 15: note = C-term amino
XNXXDXXAFKXXXEA

SEQ ID NO: 273 - protein, 15 aa, synthetic construct
  SITE 1: note = N-term Acetic Acid
  SITE 1: note = (R)-2-allylpyrrolidine-2-carboxylic acid, useful for stapling/stapled with another amino acid residue comprising an olefin group to form a staple through the olefin group
  SITE 3: note = (S)-2-amino-4,4-dimethylpentanoic acid
  VARIANT 4: note = 2-amino-2-(pent-4-en-1-yl)hept-6-enoic acid, useful for stapling/stapled with another amino acid residue comprising an olefin group to form a staple through one of the two olefin groups and/or with another amino acid residue comprising an olefin group to form a staple through the other of the two olefin groups
  SITE 6: note = (S)-3-(2-amino-2-carboxyethyl)benzoic acid
  SITE 7: note = (S)-2-amino-5-morpholino-5-oxopentanoic acid
  SITE 10: note = L-lysine, useful for stapling/stapled with another amino acid residue comprising a side chain acid group to form a staple through the 6-amino group
  SITE 11: note (S)-3-amino-1-((pent-4-en-1-yloxy)carbonyl)pyrrolidine-3-ca rboxylic acid, useful for stapling/stapled with another amino acid residue comprising an olefin group to form a staple through the olefin group
  SITE 12: note = (S)-2-amino-3-(thiophen-3-yl)propanoic acid
  SITE 13: note = (S)-2-amino-3-(benzo[b]thiophen-3-yl)propanoic acid
  SITE 14: note = L-glutamic acid, useful for stapling/stapled with another amino acid residue comprising a side chain amino group to form a staple through the 4-carboxyl group
  SITE 15: note = C-term amino
XSXXDXXAFKXXXEA

SEQ ID NO: 274 - protein, 15 aa, synthetic construct
  SITE 1: note = N-term Acetic Acid
  SITE 1: note = (R)-2-allylpyrrolidine-2-carboxylic acid, useful for stapling/stapled with another amino acid residue comprising an olefin group to form a staple through the olefin group
  SITE 2: note = L-allothreonine
  SITE 3: note = (S)-2-amino-4,4-dimethylpentanoic acid
  VARIANT 4: note = 2-amino-2-(pent-4-en-1-yl)hept-6-enoic acid, useful for stapling/stapled with another amino acid residue comprising an olefin group to form a staple through one of the two olefin groups and/or with another amino acid residue comprising an olefin group to form a staple through the other of the two olefin groups
  SITE 6: note = (S)-3-(2-amino-2-carboxyethyl)benzoic acid
  SITE 7: note = (S)-2-amino-5-morpholino-5-oxopentanoic acid
  SITE 10: note = L-lysine, useful for stapling/stapled with another amino acid residue comprising a side chain acid group to form a staple through the 6-amino group
  SITE 11: note (S)-3-amino-1-((pent-4-en-1-yloxy)carbonyl)pyrrolidine-3-ca rboxylic acid, useful for stapling/stapled with another amino acid residue comprising an olefin group to form a staple through the olefin group
  SITE 12: note = (S)-2-amino-3-(thiophen-3-yl)propanoic acid
  SITE 13: note = (S)-2-amino-3-(benzo[b]thiophen-3-yl)propanoic acid
  SITE 14: note = L-glutamic acid, useful for stapling/stapled with another amino acid residue comprising a side chain amino group to form a staple through the 4-carboxyl group
  SITE 15: note = C-term amino
XTXXDXXAFKXXXEA

SEQ ID NO: 275 - protein, 15 aa, synthetic construct
  SITE 1: note = N-term Acetic Acid
  SITE 1: note = (R)-2-allylpyrrolidine-2-carboxylic acid, useful for stapling/stapled with another amino acid residue comprising an olefin group to form a staple through the olefin group
  SITE 3: note = (S)-2-amino-4,4-dimethylpentanoic acid
  VARIANT 4: note = 2-amino-2-(pent-4-en-1-yl)hept-6-enoic acid, useful for stapling/stapled with another amino acid residue comprising an olefin group to form a staple through one of the two olefin groups and/or with another amino acid residue comprising an olefin group to form a staple through the other of the two olefin groups
  SITE 6: note = (S)-3-(2-amino-2-carboxyethyl)benzoic acid
  SITE 7: note = (S)-2-amino-5-morpholino-5-oxopentanoic acid
  SITE 10: note = L-lysine, useful for stapling/stapled with another amino acid residue comprising a side chain acid group to form a staple through the 6-amino group
  SITE 11: note (S)-3-amino-1-((pent-4-en-1-yloxy)carbonyl)pyrrolidine-3-ca rboxylic acid, useful for stapling/stapled with another amino acid residue comprising an olefin group to form a staple through the olefin group
  SITE 12: note = (S)-2-amino-3-(thiophen-3-yl)propanoic acid
  SITE 13: note = (S)-2-amino-3-(benzo[b]thiophen-3-yl)propanoic acid
  SITE 14: note = L-glutamic acid, useful for stapling/stapled with another amino acid residue comprising a side chain amino group to form a staple through the 4-carboxyl group
  SITE 15: note = C-term amino
XDXXNXXAFKXXXEA

SEQ ID NO: 276 - protein, 15 aa, synthetic construct
  SITE 1: note = N-term Acetic Acid
  SITE 1: note = (R)-2-allylpyrrolidine-2-carboxylic acid, useful for stapling/stapled with another amino acid residue comprising an olefin group to form a staple through the olefin group
  SITE 3: note = (S)-2-amino-4,4-dimethylpentanoic acid
  VARIANT 4: note = 2-amino-2-(pent-4-en-1-yl)hept-6-enoic acid, useful for stapling/stapled with another amino acid residue comprising an olefin group to form a staple through one of the two olefin groups and/or with another amino acid residue comprising an olefin group to form a staple through the other of the two olefin groups
  SITE 6: note = (S)-3-(2-amino-2-carboxyethyl)benzoic acid
  SITE 7: note = 2-amino-2-methylpropanoic acid
  SITE 10: note = L-lysine, useful for stapling/stapled with another amino acid residue comprising a side chain acid group to form a staple through the 6-amino group
  SITE 11: note (S)-3-amino-1-((pent-4-en-1-yloxy)carbonyl)pyrrolidine-3-ca rboxylic acid, useful for stapling/stapled with another amino acid residue comprising an olefin group to form a staple through the olefin group
  SITE 12: note = (S)-2-amino-3-(2-(trifluoromethyl)phenyl)propanoic acid
  SITE 13: note = (S)-2-amino-3-(3,4-dichlorophenyl)propanoic acid
  SITE 14: note = L-glutamic acid, useful for stapling/stapled with another amino acid residue comprising a side chain amino group to form a staple through the 4-carboxyl group
  SITE 15: note = C-term amino
XDXXDXXAFKXXXEA

SEQ ID NO: 277 - protein, 15 aa, synthetic construct
  SITE 1: note = N-term Acetic Acid
  SITE 1: note = (R)-2-allylpyrrolidine-2-carboxylic acid, useful for stapling/stapled with another amino acid residue comprising an olefin group to form a staple through the olefin group
  SITE 3: note = (S)-2-amino-4,4-dimethylpentanoic acid
  VARIANT 4: note = 2-amino-2-(pent-4-en-1-yl)hept-6-enoic acid, useful for stapling/stapled with another amino acid residue comprising an olefin group to form a staple through one of the two olefin groups and/or with another amino acid residue comprising an olefin group to form a staple through the other of the two olefin groups
  SITE 6: note = (S)-3-(2-amino-2-carboxyethyl)benzoic acid
  SITE 7: note = 2-amino-2-methylpropanoic acid
  SITE 10: note = L-lysine, useful for stapling/stapled with another amino acid residue comprising a side chain acid group to form a staple through the 6-amino group
  SITE 11: note (S)-3-amino-1-((pent-4-en-1-yloxy)carbonyl)pyrrolidine-3-ca rboxylic acid, useful for stapling/stapled with another amino acid residue comprising an olefin group to form a staple through the olefin group
  SITE 12: note = (S)-2-amino-3-(thiophen-3-yl)propanoic acid
  SITE 13: note = (S)-2-amino-3-(3,4-dichlorophenyl)propanoic acid
  SITE 14: note = L-glutamic acid, useful for stapling/stapled with another amino acid residue comprising a side chain amino group to form a staple through the 4-carboxyl group
  SITE 15: note = C-term amino
XDXXDXXAFKXXXEA

SEQ ID NO: 278 - protein, 15 aa, synthetic construct
  SITE 1: note = N-term Acetic Acid
  SITE 1: note = (R)-2-allylpyrrolidine-2-carboxylic acid, useful for stapling/stapled with another amino acid residue comprising an olefin group to form a staple through the olefin group
  SITE 3: note = (S)-2-amino-4,4-dimethylpentanoic acid
  VARIANT 4: note = 2-amino-2-(pent-4-en-1-yl)hept-6-enoic acid, useful for stapling/stapled with another amino acid residue comprising an olefin group to form a staple through one of the two olefin groups and/or with another amino acid residue comprising an olefin group to form a staple through the other of the two olefin groups
  SITE 6: note = (S)-3-(2-amino-2-carboxyethyl)benzoic acid
  SITE 7: note = 2-amino-2-methylpropanoic acid
  SITE 10: note = L-lysine, useful for stapling/stapled with another amino acid residue comprising a side chain acid group to form a staple through the 6-amino group
  SITE 11: note (S)-3-amino-1-((pent-4-en-1-yloxy)carbonyl)pyrrolidine-3-ca rboxylic acid, useful for stapling/stapled with another amino acid residue comprising an olefin group to form a staple through the olefin group
  SITE 13: note = (S)-2-amino-3-(3,4-dichlorophenyl)propanoic acid
  SITE 14: note = L-glutamic acid, useful for stapling/stapled with another amino acid residue comprising a side chain amino group to form a staple through the 4-carboxyl group
  SITE 15: note = C-term amino
XDXXDXXAFKXFXEA

SEQ ID NO: 279 - protein, 15 aa, synthetic construct
  SITE 1: note = N-term Acetic Acid
  SITE 1: note = (R)-2-allylpyrrolidine-2-carboxylic acid, useful for stapling/stapled with another amino acid residue comprising an olefin group to form a staple through the olefin group
  SITE 3: note = (S)-2-amino-4,4-dimethylpentanoic acid
  VARIANT 4: note = 2-amino-2-(pent-4-en-1-yl)hept-6-enoic acid, useful for stapling/stapled with another amino acid residue comprising an olefin group to form a staple through one of the two olefin groups and/or with another amino acid residue comprising an olefin group to form a staple through the other of the two olefin groups
  SITE 6: note = (S)-3-(2-amino-2-carboxyethyl)benzoic acid
  SITE 7: note = 2-amino-2-methylpropanoic acid
  SITE 10: note = L-lysine, useful for stapling/stapled with another amino acid residue comprising a side chain acid group to form a staple through the 6-amino group
  SITE 11: note (S)-3-amino-1-((pent-4-en-1-yloxy)carbonyl)pyrrolidine-3-ca rboxylic acid, useful for stapling/stapled with another amino acid residue comprising an olefin group to form a staple through the olefin group
  SITE 12: note = (S)-2-amino-3-(2-(trifluoromethyl)phenyl)propanoic acid
  SITE 13: note = (S)-2-amino-3-(3,4-dimethylphenyl)propanoic acid
  SITE 14: note = L-glutamic acid, useful for stapling/stapled with another amino acid residue comprising a side chain amino group to form a staple through the 4-carboxyl group
  SITE 15: note = C-term amino
XDXXDXXAFKXXXEA

SEQ ID NO: 280 - protein, 15 aa, synthetic construct
  SITE 1: note = N-term Acetic Acid
  SITE 1: note = (R)-2-allylpyrrolidine-2-carboxylic acid, useful for stapling/stapled with another amino acid residue comprising an olefin group to form a staple through the olefin group
  SITE 3: note = (S)-2-amino-4,4-dimethylpentanoic acid
  VARIANT 4: note = 2-amino-2-(pent-4-en-1-yl)hept-6-enoic acid, useful for stapling/stapled with another amino acid residue comprising an olefin group to form a staple through one of the two olefin groups and/or with another amino acid residue comprising an olefin group to form a staple through the other of the two olefin groups
  SITE 6: note = (S)-3-(2-amino-2-carboxyethyl)benzoic acid
  SITE 7: note = 2-amino-2-methylpropanoic acid
  SITE 10: note = L-lysine, useful for stapling/stapled with another amino acid residue comprising a side chain acid group to form a staple through the 6-amino group
  SITE 11: note (S)-3-amino-1-((pent-4-en-1-yloxy)carbonyl)pyrrolidine-3-ca rboxylic acid, useful for stapling/stapled with another amino acid residue comprising an olefin group to form a staple through the olefin group
  SITE 12: note = (S)-2-amino-3-(2-(trifluoromethyl)phenyl)propanoic acid
  SITE 13: note = (S)-2-amino-3-(3-bromophenyl)propanoic acid
  SITE 14: note = L-glutamic acid, useful for stapling/stapled with another amino acid residue comprising a side chain amino group to form a staple through the 4-carboxyl group
  SITE 15: note = C-term amino
XDXXDXXAFKXXXEA

SEQ ID NO: 281 - protein, 15 aa, synthetic construct
  SITE 1: note = N-term Acetic Acid
  SITE 1: note = (R)-2-allylpyrrolidine-2-carboxylic acid, useful for stapling/stapled with another amino acid residue comprising an olefin group to form a staple through the olefin group
  SITE 3: note = (S)-2-amino-4,4-dimethylpentanoic acid
  VARIANT 4: note = 2-amino-2-(pent-4-en-1-yl)hept-6-enoic acid, useful for stapling/stapled with another amino acid residue comprising an olefin group to form a staple through one of the two olefin groups and/or with another amino acid residue comprising an olefin group to form a staple through the other of the two olefin groups
  SITE 6: note = (S)-3-(2-amino-2-carboxyethyl)benzoic acid
  SITE 7: note = 2-amino-2-methylpropanoic acid
  SITE 10: note = L-lysine, useful for stapling/stapled with another amino acid residue comprising a side chain acid group to form a staple through the 6-amino group
  SITE 11: note (S)-3-amino-1-((pent-4-en-1-yloxy)carbonyl)pyrrolidine-3-ca rboxylic acid, useful for stapling/stapled with another amino acid residue comprising an olefin group to form a staple through the olefin group
  SITE 12: note = (S)-2-amino-3-(thiophen-3-yl)propanoic acid
  SITE 13: note = (S)-2-amino-3-(3-bromophenyl)propanoic acid
  SITE 14: note = L-glutamic acid, useful for stapling/stapled with another amino acid residue comprising a side chain amino group to form a staple through the 4-carboxyl group
  SITE 15: note = C-term amino
XDXXDXXAFKXXXEA

SEQ ID NO: 282 - protein, 15 aa, synthetic construct
  SITE 1: note = N-term Acetic Acid
  SITE 1: note = (R)-2-allylpyrrolidine-2-carboxylic acid, useful for stapling/stapled with another amino acid residue comprising an olefin group to form a staple through the olefin group
  SITE 3: note = (S)-2-amino-4,4-dimethylpentanoic acid
  VARIANT 4: note = 2-amino-2-(pent-4-en-1-yl)hept-6-enoic acid, useful for stapling/stapled with another amino acid residue comprising an olefin group to form a staple through one of the two olefin groups and/or with another amino acid residue comprising an olefin group to form a staple through the other of the two olefin groups
  SITE 6: note = (S)-3-(2-amino-2-carboxyethyl)benzoic acid
  SITE 7: note = 2-amino-2-methylpropanoic acid
  SITE 10: note = L-lysine, useful for stapling/stapled with another amino acid residue comprising a side chain acid group to form a staple through the 6-amino group
  SITE 11: note (S)-3-amino-1-((pent-4-en-1-yloxy)carbonyl)pyrrolidine-3-ca rboxylic acid, useful for stapling/stapled with another amino acid residue comprising an olefin group to form a staple through the olefin group
  SITE 13: note = (S)-2-amino-3-(3-bromophenyl)propanoic acid
  SITE 14: note = L-glutamic acid, useful for stapling/stapled with another amino acid residue comprising a side chain amino group to form a staple through the 4-carboxyl group
  SITE 15: note = C-term amino
XDXXDXXAFKXFXEA

SEQ ID NO: 283 - protein, 15 aa, synthetic construct
  SITE 1: note = N-term Acetic Acid
  SITE 1: note = (R)-2-allylpyrrolidine-2-carboxylic acid, useful for stapling/stapled with another amino acid residue comprising an olefin group to form a staple through the olefin group
  SITE 3: note = (S)-2-amino-4,4-dimethylpentanoic acid
  VARIANT 4: note = 2-amino-2-(pent-4-en-1-yl)hept-6-enoic acid, useful for stapling/stapled with another amino acid residue comprising an olefin group to form a staple through one of the two olefin groups and/or with another amino acid residue comprising an olefin group to form a staple through the other of the two olefin groups
  SITE 6: note = (S)-3-(2-amino-2-carboxyethyl)benzoic acid
  SITE 7: note = 2-amino-2-methylpropanoic acid
  SITE 10: note = L-lysine, useful for stapling/stapled with another amino acid residue comprising a side chain acid group to form a staple through the 6-amino group
  SITE 11: note (S)-3-amino-1-((pent-4-en-1-yloxy)carbonyl)pyrrolidine-3-ca rboxylic acid, useful for stapling/stapled with another amino acid residue comprising an olefin group to form a staple through the olefin group
  SITE 12: note = (S)-2-amino-3-(naphthalen-1-yl)propanoic acid
  SITE 13: note = (S)-2-amino-3-(benzo[b]thiophen-3-yl)propanoic acid
  SITE 14: note = L-glutamic acid, useful for stapling/stapled with another amino acid residue comprising a side chain amino group to form a staple through the 4-carboxyl group
  SITE 15: note = C-term amino
XDXXDXXAFKXXXEA

SEQ ID NO: 284 - protein, 15 aa, synthetic construct
  SITE 1: note = N-term Acetic Acid
  SITE 1: note = (R)-2-allylpyrrolidine-2-carboxylic acid, useful for stapling/stapled with another amino acid residue comprising an olefin group to form a staple through the olefin group
  SITE 3: note = (S)-2-amino-4,4-dimethylpentanoic acid
  VARIANT 4: note = 2-amino-2-(pent-4-en-1-yl)hept-6-enoic acid, useful for stapling/stapled with another amino acid residue comprising an olefin group to form a staple through one of the two olefin groups and/or with another amino acid residue comprising an olefin group to form a staple through the other of the two olefin groups
  SITE 6: note = (S)-3-(2-amino-2-carboxyethyl)benzoic acid
  SITE 7: note = 2-amino-2-methylpropanoic acid
  SITE 10: note = (S)-2-amino-6-(1H-1,2,3-triazol-1-yl)hexanoic acid, useful for stapling/stapled with another amino acid residue to form a staple through the 4-position of the triazolyl group
  SITE 11: note (S)-3-amino-1-((pent-4-en-1-yloxy)carbonyl)pyrrolidine-3-ca rboxylic acid, useful for stapling/stapled with another amino acid residue comprising an olefin group to form a staple through the olefin group
  SITE 12: note = (S)-2-amino-3-(thiophen-3-yl)propanoic acid
  SITE 13: note = (S)-2-amino-3-(benzo[b]thiophen-3-yl)propanoic acid
  SITE 14: note = L-alanine, useful for stapling/stapled with another amino acid residue comprising a triazolyl group to form a staple through the terminal methyl group
  SITE 15: note = C-term amino
XDXXDXXAFXXXXAA

SEQ ID NO: 285 - protein, 15 aa, synthetic construct
  SITE 1: note = N-term Acetic Acid
  SITE 1: note = (R)-2-allylpyrrolidine-2-carboxylic acid, useful for stapling/stapled with another amino acid residue comprising an olefin group to form a staple through the olefin group
  SITE 3: note = (S)-2-amino-4,4-dimethylpentanoic acid
  VARIANT 4: note = 2-amino-2-(pent-4-en-1-yl)hept-6-enoic acid, useful for stapling/stapled with another amino acid residue comprising an olefin group to form a staple through one of the two olefin groups and/or with another amino acid residue comprising an olefin group to form a staple through the other of the two olefin groups
  SITE 6: note = (S)-3-(2-amino-2-carboxyethyl)benzoic acid
  SITE 7: note = 2-amino-2-methylpropanoic acid
  SITE 10: note = L-alanine, useful for stapling/stapled with another amino acid residue comprising a triazolyl group to form a staple through the terminal methyl group
  SITE 11: note (S)-3-amino-1-((pent-4-en-1-yloxy)carbonyl)pyrrolidine-3-ca rboxylic acid, useful for stapling/stapled with another amino acid residue comprising an olefin group to form a staple through the olefin group
  SITE 12: note = (S)-2-amino-3-(thiophen-3-yl)propanoic acid
  SITE 13: note = (S)-2-amino-3-(benzo[b]thiophen-3-yl)propanoic acid
  SITE 14: note = (S)-2-amino-6-(1H-1,2,3-triazol-1-yl)hexanoic acid, useful for stapling/stapled with another amino acid residue to form a staple through the 4-position of the triazolyl group
  SITE 15: note = C-term amino
XDXXDXXAFAXXXXA

SEQ ID NO: 286 - protein, 15 aa, synthetic construct
  SITE 1: note = N-term Acetic Acid
  SITE 1: note = (R)-2-allylpyrrolidine-2-carboxylic acid, useful for stapling/stapled with another amino acid residue comprising an olefin group to form a staple through the olefin group
  SITE 3: note = (S)-2-amino-4,4-dimethylpentanoic acid
  VARIANT 4: note = 2-amino-2-(pent-4-en-1-yl)hept-6-enoic acid, useful for stapling/stapled with another amino acid residue comprising an olefin group to form a staple through one of the two olefin groups and/or with another amino acid residue comprising an olefin group to form a staple through the other of the two olefin groups
  SITE 6: note = (S)-3-(2-amino-2-carboxyethyl)benzoic acid
  SITE 10: note = (S)-2-amino-6-(1H-1,2,3-triazol-1-yl)hexanoic acid, useful for stapling/stapled with another amino acid residue to form a staple through the 4-position of the triazolyl group
  SITE 11: note (S)-3-amino-1-((pent-4-en-1-yloxy)carbonyl)pyrrolidine-3-ca rboxylic acid, useful for stapling/stapled with another amino acid residue comprising an olefin group to form a staple through the olefin group
  SITE 12: note = (S)-2-amino-3-(thiophen-3-yl)propanoic acid
  SITE 13: note = (S)-2-amino-3-(benzo[b]thiophen-3-yl)propanoic acid
  SITE 14: note = L-alanine, useful for stapling/stapled with another amino acid residue comprising a triazolyl group to form a staple through the terminal methyl group
  SITE 15: note = C-term amino
XDXXDXAAFXXXXAA

SEQ ID NO: 287 - protein, 15 aa, synthetic construct
  SITE 1: note = N-term Acetic Acid
  SITE 1: note = (R)-2-allylpyrrolidine-2-carboxylic acid, useful for stapling/stapled with another amino acid residue comprising an olefin group to form a staple through the olefin group
  SITE 3: note = (S)-2-amino-4,4-dimethylpentanoic acid
  VARIANT 4: note = 2-amino-2-(pent-4-en-1-yl)hept-6-enoic acid, useful for stapling/stapled with another amino acid residue comprising an olefin group to form a staple through one of the two olefin groups and/or with another amino acid residue comprising an olefin group to form a staple through the other of the two olefin groups
  SITE 6: note = (S)-3-(2-amino-2-carboxyethyl)benzoic acid
  SITE 10: note = L-alanine, useful for stapling/stapled with another amino acid residue comprising a triazolyl group to form a staple through the terminal methyl group
  SITE 11: note (S)-3-amino-1-((pent-4-en-1-yloxy)carbonyl)pyrrolidine-3-ca rboxylic acid, useful for stapling/stapled with another amino acid residue comprising an olefin group to form a staple through the olefin group
  SITE 12: note = (S)-2-amino-3-(thiophen-3-yl)propanoic acid
  SITE 13: note = (S)-2-amino-3-(benzo[b]thiophen-3-yl)propanoic acid
  SITE 14: note = (S)-2-amino-6-(1H-1,2,3-triazol-1-yl)hexanoic acid, useful for stapling/stapled with another amino acid residue to form a staple through the 4-position of the triazolyl group
  SITE 15: note = C-term amino
XDXXDXAAFAXXXXA

SEQ ID NO: 288 - protein, 15 aa, synthetic construct
  SITE 1: note = N-term Acetic Acid
  SITE 1: note = (R)-2-allylpyrrolidine-2-carboxylic acid, useful for stapling/stapled with another amino acid residue comprising an olefin group to form a staple through the olefin group
  SITE 3: note = (S)-2-amino-4,4-dimethylpentanoic acid
  VARIANT 4: note = 2-amino-2-(pent-4-en-1-yl)hept-6-enoic acid, useful for stapling/stapled with another amino acid residue comprising an olefin group to form a staple through one of the two olefin groups and/or with another amino acid residue comprising an olefin group to form a staple through the other of the two olefin groups
  SITE 6: note = (S)-3-(2-amino-2-carboxyethyl)benzoic acid
  SITE 7: note = 2-amino-2-methylpropanoic acid
  SITE 10: note = Cysteine, sulfur bonded to position 1 of 2,3,5,6-tetrafluorobenzene, useful for stapling/stapled with another thiol through position 4 of 2,3,5,6-tetrafluorobenzene
  SITE 11: note (S)-3-amino-1-((pent-4-en-1-yloxy)carbonyl)pyrrolidine-3-ca rboxylic acid, useful for stapling/stapled with another amino acid residue comprising an olefin group to form a staple through the olefin group
  SITE 12: note = (S)-2-amino-3-(2-(trifluoromethyl)phenyl)propanoic acid
  SITE 13: note = (S)-2-amino-3-(benzo[b]thiophen-3-yl)propanoic acid
  SITE 15: note = C-term amino
XDXXDXXAFCXXXCA

SEQ ID NO: 289 - protein, 15 aa, synthetic construct
  SITE 1: note = N-term Acetic Acid
  SITE 1: note = (R)-2-allylpyrrolidine-2-carboxylic acid, useful for stapling/stapled with another amino acid residue comprising an olefin group to form a staple through the olefin group
  SITE 3: note = (S)-2-amino-4,4-dimethylpentanoic acid
  VARIANT 4: note = 2-amino-2-(pent-4-en-1-yl)hept-6-enoic acid, useful for stapling/stapled with another amino acid residue comprising an olefin group to form a staple through one of the two olefin groups and/or with another amino acid residue comprising an olefin group to form a staple through the other of the two olefin groups
  SITE 6: note = (S)-3-(2-amino-2-carboxyethyl)benzoic acid
  SITE 7: note = 2-amino-2-methylpropanoic acid
  SITE 10: note = Cysteine, sulfur bonded to position 4 of 2,2',3,3',5,5',6,6'-octafluoro-1,1'-biphenyl, useful for stapling/stapled with another thiol through position 4' of 2,2',3,3',5,5',6,6'-octafluoro-1,1'-biphenyl
  SITE 11: note (S)-3-amino-1-((pent-4-en-1-yloxy)carbonyl)pyrrolidine-3-ca rboxylic acid, useful for stapling/stapled with another amino acid residue comprising an olefin group to form a staple through the olefin group
  SITE 12: note = (S)-2-amino-3-(2-(trifluoromethyl)phenyl)propanoic acid
  SITE 13: note = (S)-2-amino-3-(benzo[b]thiophen-3-yl)propanoic acid
  SITE 15: note = C-term amino
XDXXDXXAFCXXXCA

SEQ ID NO: 290 - protein, 16 aa, synthetic construct
  SITE 1: note = N-term Acetic Acid
  SITE 1: note = (R)-2-allylpyrrolidine-2-carboxylic acid, useful for stapling/stapled with another amino acid residue comprising an olefin group to form a staple through the olefin group
  SITE 3: note = (S)-2-amino-4,4-dimethylpentanoic acid
  VARIANT 4: note = 2-amino-2-(pent-4-en-1-yl)hept-6-enoic acid, useful for stapling/stapled with another amino acid residue comprising an olefin group to form a staple through one of the two olefin groups and/or with another amino acid residue comprising an olefin group to form a staple through the other of the two olefin groups
  SITE 6: note = (S)-3-(2-amino-2-carboxyethyl)benzoic acid
  SITE 7: note = 2-amino-2-methylpropanoic acid
  SITE 10: note = L-lysine, useful for stapling/stapled with another amino acid residue comprising a side chain acid group to form a staple through the 6-amino group
  SITE 11: note (S)-3-amino-1-((pent-4-en-1-yloxy)carbonyl)pyrrolidine-3-ca rboxylic acid, useful for stapling/stapled with another amino acid residue comprising an olefin group to form a staple through the olefin group
  SITE 12: note = (S)-2-amino-3-(thiophen-3-yl)propanoic acid
  SITE 13: note = (S)-2-amino-3-(benzo[b]thiophen-3-yl)propanoic acid
  SITE 14: note = L-glutamic acid, useful for stapling/stapled with another amino acid residue comprising a side chain amino group to form a staple through the 4-carboxyl group
  SITE 16: note = C-term amino
XDXXDXXAFKXXXEEA

SEQ ID NO: 291 - protein, 17 aa, synthetic construct
  SITE 1: note = N-term Acetic Acid
  SITE 1: note = (R)-2-allylpyrrolidine-2-carboxylic acid, useful for stapling/stapled with another amino acid residue comprising an olefin group to form a staple through the olefin group
  SITE 3: note = (S)-2-amino-4,4-dimethylpentanoic acid
  VARIANT 4: note = 2-amino-2-(pent-4-en-1-yl)hept-6-enoic acid, useful for stapling/stapled with another amino acid residue comprising an olefin group to form a staple through one of the two olefin groups and/or with another amino acid residue comprising an olefin group to form a staple through the other of the two olefin groups
  SITE 6: note = (S)-3-(2-amino-2-carboxyethyl)benzoic acid
  SITE 7: note = 2-amino-2-methylpropanoic acid
  SITE 10: note = L-lysine, useful for stapling/stapled with another amino acid residue comprising a side chain acid group to form a staple through the 6-amino group
  SITE 11: note (S)-3-amino-1-((pent-4-en-1-yloxy)carbonyl)pyrrolidine-3-ca rboxylic acid, useful for stapling/stapled with another amino acid residue comprising an olefin group to form a staple through the olefin group
  SITE 12: note = (S)-2-amino-3-(thiophen-3-yl)propanoic acid
  SITE 13: note = (S)-2-amino-3-(benzo[b]thiophen-3-yl)propanoic acid
  SITE 14: note = L-glutamic acid, useful for stapling/stapled with another amino acid residue comprising a side chain amino group to form a staple through the 4-carboxyl group
  SITE 17: note = C-term amino
XDXXDXXAFKXXXEAEA

SEQ ID NO: 292 - protein, 15 aa, synthetic construct
  SITE 1: note = N-term Acetic Acid
  SITE 1: note = (R)-2-allylpyrrolidine-2-carboxylic acid, useful for stapling/stapled with another amino acid residue comprising an olefin group to form a staple through the olefin group
  SITE 3: note = (S)-2-amino-4,4-dimethylpentanoic acid
  VARIANT 4: note = 2-amino-2-(pent-4-en-1-yl)hept-6-enoic acid, useful for stapling/stapled with another amino acid residue comprising an olefin group to form a staple through one of the two olefin groups and/or with another amino acid residue comprising an olefin group to form a staple through the other of the two olefin groups
  SITE 6: note = (S)-3-(2-amino-2-carboxyethyl)benzoic acid
  SITE 7: note = 2-amino-2-methylpropanoic acid
  SITE 10: note = L-lysine, useful for stapling/stapled with another amino acid residue comprising a side chain acid group to form a staple through the 6-amino group
  SITE 11: note (S)-3-amino-1-((pent-4-en-1-yloxy)carbonyl)pyrrolidine-3-ca rboxylic acid, useful for stapling/stapled with another amino acid residue comprising an olefin group to form a staple through the olefin group
  SITE 12: note = (S)-2-(2-amino-2-carboxyethyl)benzoic acid
  SITE 13: note = (S)-2-amino-3-(benzo[b]thiophen-3-yl)propanoic acid
  SITE 14: note = L-glutamic acid, useful for stapling/stapled with another amino acid residue comprising a side chain amino group to form a staple through the 4-carboxyl group
  SITE 15: note = C-term amino
XDXXDXXAFKXXXEA

SEQ ID NO: 293 - protein, 15 aa, synthetic construct
  SITE 1: note = N-term Acetic Acid
  SITE 1: note = (R)-2-allylpyrrolidine-2-carboxylic acid, useful for stapling/stapled with another amino acid residue comprising an olefin group to form a staple through the olefin group
  SITE 3: note = (S)-2-amino-4,4-dimethylpentanoic acid
  VARIANT 4: note = 2-amino-2-(pent-4-en-1-yl)hept-6-enoic acid, useful for stapling/stapled with another amino acid residue comprising an olefin group to form a staple through one of the two olefin groups and/or with another amino acid residue comprising an olefin group to form a staple through the other of the two olefin groups
  SITE 6: note = (S)-3-(2-amino-2-carboxyethyl)benzoic acid
  SITE 7: note = 2-amino-2-methylpropanoic acid
  SITE 9: note = (S)-3-(2-amino-2-carboxyethyl)benzoic acid
  SITE 10: note = L-lysine, useful for stapling/stapled with another amino acid residue comprising a side chain acid group to form a staple through the 6-amino group
  SITE 11: note (S)-3-amino-1-((pent-4-en-1-yloxy)carbonyl)pyrrolidine-3-ca rboxylic acid, useful for stapling/stapled with another amino acid residue comprising an olefin group to form a staple through the olefin group
  SITE 12: note = (S)-2-amino-3-(thiophen-3-yl)propanoic acid
  SITE 13: note = (S)-2-amino-3-(benzo[b]thiophen-3-yl)propanoic acid
  SITE 14: note = L-glutamic acid, useful for stapling/stapled with another amino acid residue comprising a side chain amino group to form a staple through the 4-carboxyl group
  SITE 15: note = C-term amino
XDXXDXXAXKXXXEA

SEQ ID NO: 294 - protein, 15 aa, synthetic construct
  SITE 1: note = N-term Acetic Acid
  SITE 1: note = (R)-2-allylpyrrolidine-2-carboxylic acid, useful for stapling/stapled with another amino acid residue comprising an olefin group to form a staple through the olefin group
  SITE 3: note = (S)-2-amino-4,4-dimethylpentanoic acid
  VARIANT 4: note = 2-amino-2-(pent-4-en-1-yl)hept-6-enoic acid, useful for stapling/stapled with another amino acid residue comprising an olefin group to form a staple through one of the two olefin groups and/or with another amino acid residue comprising an olefin group to form a staple through the other of the two olefin groups
  SITE 6: note = (S)-3-(2-amino-2-carboxyethyl)benzoic acid
  SITE 7: note = 2-amino-2-methylpropanoic acid
  SITE 9: note = (S)-3-(2-amino-2-carboxyethyl)benzoic acid
  SITE 10: note = L-lysine, useful for stapling/stapled with another amino acid residue comprising a side chain acid group to form a staple through the 6-amino group
  SITE 11: note (S)-3-amino-1-((pent-4-en-1-yloxy)carbonyl)pyrrolidine-3-ca rboxylic acid, useful for stapling/stapled with another amino acid residue comprising an olefin group to form a staple through the olefin group
  SITE 12: note = (S)-2-(2-amino-2-carboxyethyl)benzoic acid
  SITE 13: note = (S)-2-amino-3-(benzo[b]thiophen-3-yl)propanoic acid
  SITE 14: note = L-glutamic acid, useful for stapling/stapled with another amino acid residue comprising a side chain amino group to form a staple through the 4-carboxyl group
  SITE 15: note = C-term amino
XDXXDXXAXKXXXEA

SEQ ID NO: 295 - protein, 17 aa, synthetic construct
  SITE 1: note = N-term Acetic Acid
  SITE 1: note = (R)-2-allylpyrrolidine-2-carboxylic acid, useful for stapling/stapled with another amino acid residue comprising an olefin group to form a staple through the olefin group
  SITE 3: note = (S)-2-amino-4,4-dimethylpentanoic acid
  VARIANT 4: note = 2-amino-2-(pent-4-en-1-yl)hept-6-enoic acid, useful for stapling/stapled with another amino acid residue comprising an olefin group to form a staple through one of the two olefin groups and/or with another amino acid residue comprising an olefin group to form a staple through the other of the two olefin groups
  SITE 6: note = (S)-3-(2-amino-2-carboxyethyl)benzoic acid
  SITE 7: note = 2-amino-2-methylpropanoic acid
  SITE 9: note = (S)-3-(2-amino-2-carboxyethyl)benzoic acid
  SITE 10: note = L-lysine, useful for stapling/stapled with another amino acid residue comprising a side chain acid group to form a staple through the 6-amino group
  SITE 11: note (S)-3-amino-1-((pent-4-en-1-yloxy)carbonyl)pyrrolidine-3-ca rboxylic acid, useful for stapling/stapled with another amino acid residue comprising an olefin group to form a staple through the olefin group
  SITE 12: note = (S)-2-(2-amino-2-carboxyethyl)benzoic acid
  SITE 13: note = (S)-2-amino-3-(benzo[b]thiophen-3-yl)propanoic acid
  SITE 14: note = L-glutamic acid, useful for stapling/stapled with another amino acid residue comprising a side chain amino group to form a staple through the 4-carboxyl group
  SITE 17: note = C-term amino
XDXXDXXAXKXXXEAEA

SEQ ID NO: 296 - protein, 16 aa, synthetic construct
  SITE 1: note = N-term Acetic Acid
  SITE 1: note = (R)-2-allylpyrrolidine-2-carboxylic acid, useful for stapling/stapled with another amino acid residue comprising an olefin group to form a staple through the olefin group
  SITE 3: note = (S)-2-amino-4,4-dimethylpentanoic acid
  VARIANT 4: note = 2-amino-2-(pent-4-en-1-yl)hept-6-enoic acid, useful for stapling/stapled with another amino acid residue comprising an olefin group to form a staple through one of the two olefin groups and/or with another amino acid residue comprising an olefin group to form a staple through the other of the two olefin groups
  SITE 6: note = (S)-3-(2-amino-2-carboxyethyl)benzoic acid
  SITE 7: note = 2-amino-2-methylpropanoic acid
  SITE 10: note = L-lysine, useful for stapling/stapled with another amino acid residue comprising a side chain acid group to form a staple through the 6-amino group
  SITE 11: note (S)-3-amino-1-((pent-4-en-1-yloxy)carbonyl)pyrrolidine-3-ca rboxylic acid, useful for stapling/stapled with another amino acid residue comprising an olefin group to form a staple through the olefin group
  SITE 12: note = (S)-2-amino-3-(thiophen-3-yl)propanoic acid
  SITE 13: note = (S)-2-amino-3-(benzo[b]thiophen-3-yl)propanoic acid
  SITE 14: note = L-glutamic acid, useful for stapling/stapled with another amino acid residue comprising a side chain amino group to form a staple through the 4-carboxyl group
  SITE 16: note = C-term OH
XDXXDXXAFKXXXEEA

SEQ ID NO: 297 - protein, 15 aa, synthetic construct
  SITE 1: note = N-term Acetic Acid
  SITE 1: note = (R)-2-allylpyrrolidine-2-carboxylic acid, useful for stapling/stapled with another amino acid residue comprising an olefin group to form a staple through the olefin group
  SITE 3: note = (S)-2-amino-4,4-dimethylpentanoic acid
  VARIANT 4: note = 2-amino-2-(pent-4-en-1-yl)hept-6-enoic acid, useful for stapling/stapled with another amino acid residue comprising an olefin group to form a staple through one of the two olefin groups and/or with another amino acid residue comprising an olefin group to form a staple through the other of the two olefin groups
  SITE 6: note = (S)-3-(2-amino-2-carboxyethyl)benzoic acid
  SITE 7: note = 2-amino-2-methylpropanoic acid
  SITE 10: note = L-lysine, useful for stapling/stapled with another amino acid residue comprising a side chain acid group to form a staple through the 6-amino group
  SITE 11: note (S)-3-amino-1-((pent-4-en-1-yloxy)carbonyl)pyrrolidine-3-ca rboxylic acid, useful for stapling/stapled with another amino acid residue comprising an olefin group to form a staple through the olefin group
  SITE 12: note = (S)-2-(2-amino-2-carboxyethyl)benzoic acid
  SITE 13: note = (S)-2-amino-3-(benzo[b]thiophen-3-yl)propanoic acid
  SITE 14: note = L-glutamic acid, useful for stapling/stapled with another amino acid residue comprising a side chain amino group to form a staple through the 4-carboxyl group
  SITE 15: note = C-term OH
XDXXDXXAFKXXXEA

SEQ ID NO: 298 - protein, 15 aa, synthetic construct
  SITE 1: note = N-term Acetic Acid
  SITE 1: note = (R)-2-allylpyrrolidine-2-carboxylic acid, useful for stapling/stapled with another amino acid residue comprising an olefin group to form a staple through the olefin group
  SITE 3: note = (S)-2-amino-4,4-dimethylpentanoic acid
  VARIANT 4: note = 2-amino-2-(pent-4-en-1-yl)hept-6-enoic acid, useful for stapling/stapled with another amino acid residue comprising an olefin group to form a staple through one of the two olefin groups and/or with another amino acid residue comprising an olefin group to form a staple through the other of the two olefin groups
  SITE 6: note = (S)-3-(2-amino-2-carboxyethyl)benzoic acid
  SITE 7: note = 2-amino-2-methylpropanoic acid
  SITE 9: note = (S)-3-(2-amino-2-carboxyethyl)benzoic acid
  SITE 10: note = L-lysine, useful for stapling/stapled with another amino acid residue comprising a side chain acid group to form a staple through the 6-amino group
  SITE 11: note (S)-3-amino-1-((pent-4-en-1-yloxy)carbonyl)pyrrolidine-3-ca rboxylic acid, useful for stapling/stapled with another amino acid residue comprising an olefin group to form a staple through the olefin group
  SITE 12: note = (S)-2-amino-3-(thiophen-3-yl)propanoic acid
  SITE 13: note = (S)-2-amino-3-(benzo[b]thiophen-3-yl)propanoic acid
  SITE 14: note = L-glutamic acid, useful for stapling/stapled with another amino acid residue comprising a side chain amino group to form a staple through the 4-carboxyl group
  SITE 15: note = C-term OH
XDXXDXXAXKXXXEA

SEQ ID NO: 299 - protein, 15 aa, synthetic construct
  SITE 1: note = N-term Acetic Acid
  SITE 1: note = (R)-2-allylpyrrolidine-2-carboxylic acid, useful for stapling/stapled with another amino acid residue comprising an olefin group to form a staple through the olefin group
  SITE 3: note = (S)-2-amino-4,4-dimethylpentanoic acid
  VARIANT 4: note = 2-amino-2-(pent-4-en-1-yl)hept-6-enoic acid, useful for stapling/stapled with another amino acid residue comprising an olefin group to form a staple through one of the two olefin groups and/or with another amino acid residue comprising an olefin group to form a staple through the other of the two olefin groups
  SITE 6: note = (S)-3-(2-amino-2-carboxyethyl)benzoic acid
  SITE 7: note = 2-amino-2-methylpropanoic acid
  SITE 9: note = (S)-3-(2-amino-2-carboxyethyl)benzoic acid
  SITE 10: note = L-lysine, useful for stapling/stapled with another amino acid residue comprising a side chain acid group to form a staple through the 6-amino group
  SITE 11: note (S)-3-amino-1-((pent-4-en-1-yloxy)carbonyl)pyrrolidine-3-ca rboxylic acid, useful for stapling/stapled with another amino acid residue comprising an olefin group to form a staple through the olefin group
  SITE 12: note = (S)-2-(2-amino-2-carboxyethyl)benzoic acid
  SITE 13: note = (S)-2-amino-3-(benzo[b]thiophen-3-yl)propanoic acid
  SITE 14: note = L-glutamic acid, useful for stapling/stapled with another amino acid residue comprising a side chain amino group to form a staple through the 4-carboxyl group
  SITE 15: note = C-term OH
XDXXDXXAXKXXXEA

SEQ ID NO: 300 - protein, 17 aa, synthetic construct
  SITE 1: note = N-term Acetic Acid
  SITE 1: note = (R)-2-allylpyrrolidine-2-carboxylic acid, useful for stapling/stapled with another amino acid residue comprising an olefin group to form a staple through the olefin group
  SITE 3: note = (S)-2-amino-4,4-dimethylpentanoic acid
  VARIANT 4: note = 2-amino-2-(pent-4-en-1-yl)hept-6-enoic acid, useful for stapling/stapled with another amino acid residue comprising an olefin group to form a staple through one of the two olefin groups and/or with another amino acid residue comprising an olefin group to form a staple through the other of the two olefin groups
  SITE 6: note = (S)-3-(2-amino-2-carboxyethyl)benzoic acid
  SITE 7: note = 2-amino-2-methylpropanoic acid
  SITE 9: note = (S)-3-(2-amino-2-carboxyethyl)benzoic acid
  SITE 10: note = L-lysine, useful for stapling/stapled with another amino acid residue comprising a side chain acid group to form a staple through the 6-amino group
  SITE 11: note (S)-3-amino-1-((pent-4-en-1-yloxy)carbonyl)pyrrolidine-3-ca rboxylic acid, useful for stapling/stapled with another amino acid residue comprising an olefin group to form a staple through the olefin group
  SITE 12: note = (S)-2-(2-amino-2-carboxyethyl)benzoic acid
  SITE 13: note = (S)-2-amino-3-(benzo[b]thiophen-3-yl)propanoic acid
  SITE 14: note = L-glutamic acid, useful for stapling/stapled with another amino acid residue comprising a side chain amino group to form a staple through the 4-carboxyl group
  SITE 17: note = C-term OH
XDXXDXXAXKXXXEAEA

SEQ ID NO: 301 - protein, 15 aa, synthetic construct
  SITE 1: note = N-term Acetic Acid
  SITE 1: note = (R)-2-allylpyrrolidine-2-carboxylic acid, useful for stapling/stapled with another amino acid residue comprising an olefin group to form a staple through the olefin group
  SITE 3: note = (S)-2-amino-4,4-dimethylpentanoic acid
  VARIANT 4: note = 2-amino-2-(pent-4-en-1-yl)hept-6-enoic acid, useful for stapling/stapled with another amino acid residue comprising an olefin group to form a staple through one of the two olefin groups and/or with another amino acid residue comprising an olefin group to form a staple through the other of the two olefin groups
  SITE 6: note = (S)-3-(2-amino-2-carboxyethyl)benzoic acid
  SITE 7: note = 2-amino-2-methylpropanoic acid
  SITE 9: note = (S)-2-amino-3-cyclobutylpropanoic acid
  SITE 10: note = L-lysine, useful for stapling/stapled with another amino acid residue comprising a side chain acid group to form a staple through the 6-amino group
  SITE 11: note (S)-3-amino-1-((pent-4-en-1-yloxy)carbonyl)pyrrolidine-3-ca rboxylic acid, useful for stapling/stapled with another amino acid residue comprising an olefin group to form a staple through the olefin group
  SITE 12: note = (S)-2-amino-3-(thiophen-3-yl)propanoic acid
  SITE 13: note = (S)-2-amino-3-(benzo[b]thiophen-3-yl)propanoic acid
  SITE 14: note = L-glutamic acid, useful for stapling/stapled with another amino acid residue comprising a side chain amino group to form a staple through the 4-carboxyl group
  SITE 15: note = C-term amino
XDXXDXXAXKXXXEA

SEQ ID NO: 302 - protein, 15 aa, synthetic construct
  SITE 1: note = N-term Acetic Acid
  SITE 1: note = (R)-2-allylpyrrolidine-2-carboxylic acid, useful for stapling/stapled with another amino acid residue comprising an olefin group to form a staple through the olefin group
  SITE 3: note = (S)-2-amino-4,4-dimethylpentanoic acid
  VARIANT 4: note = 2-amino-2-(pent-4-en-1-yl)hept-6-enoic acid, useful for stapling/stapled with another amino acid residue comprising an olefin group to form a staple through one of the two olefin groups and/or with another amino acid residue comprising an olefin group to form a staple through the other of the two olefin groups
  SITE 6: note = (S)-3-(2-amino-2-carboxyethyl)benzoic acid
  SITE 7: note = 2-amino-2-methylpropanoic acid
  SITE 9: note = (S)-2-amino-3-cyclopentylpropanoic acid
  SITE 10: note = L-lysine, useful for stapling/stapled with another amino acid residue comprising a side chain acid group to form a staple through the 6-amino group
  SITE 11: note (S)-3-amino-1-((pent-4-en-1-yloxy)carbonyl)pyrrolidine-3-ca rboxylic acid, useful for stapling/stapled with another amino acid residue comprising an olefin group to form a staple through the olefin group
  SITE 12: note = (S)-2-amino-3-(thiophen-3-yl)propanoic acid
  SITE 13: note = (S)-2-amino-3-(benzo[b]thiophen-3-yl)propanoic acid
  SITE 14: note = L-glutamic acid, useful for stapling/stapled with another amino acid residue comprising a side chain amino group to form a staple through the 4-carboxyl group
  SITE 15: note = C-term amino
XDXXDXXAXKXXXEA

SEQ ID NO: 303 - protein, 15 aa, synthetic construct
  SITE 1: note = N-term Acetic Acid
  SITE 1: note = (R)-2-allylpyrrolidine-2-carboxylic acid, useful for stapling/stapled with another amino acid residue comprising an olefin group to form a staple through the olefin group
  SITE 3: note = (S)-2-amino-4,4-dimethylpentanoic acid
  VARIANT 4: note = 2-amino-2-(pent-4-en-1-yl)hept-6-enoic acid, useful for stapling/stapled with another amino acid residue comprising an olefin group to form a staple through one of the two olefin groups and/or with another amino acid residue comprising an olefin group to form a staple through the other of the two olefin groups
  SITE 6: note = (S)-3-(2-amino-2-carboxyethyl)benzoic acid
  SITE 7: note = 2-amino-2-methylpropanoic acid
  SITE 9: note = (S)-2-amino-3-(benzo[b]thiophen-3-yl)propanoic acid
  SITE 10: note = L-lysine, useful for stapling/stapled with another amino acid residue comprising a side chain acid group to form a staple through the 6-amino group
  SITE 11: note (S)-3-amino-1-((pent-4-en-1-yloxy)carbonyl)pyrrolidine-3-ca rboxylic acid, useful for stapling/stapled with another amino acid residue comprising an olefin group to form a staple through the olefin group
  SITE 12: note = (S)-2-amino-3-(thiophen-3-yl)propanoic acid
  SITE 13: note = (S)-2-amino-3-(benzo[b]thiophen-3-yl)propanoic acid
  SITE 14: note = L-glutamic acid, useful for stapling/stapled with another amino acid residue comprising a side chain amino group to form a staple through the 4-carboxyl group
  SITE 15: note = C-term amino
XDXXDXXAXKXXXEA

SEQ ID NO: 304 - protein, 15 aa, synthetic construct
  SITE 1: note = N-term Acetic Acid
  SITE 1: note = (R)-2-allylpyrrolidine-2-carboxylic acid, useful for stapling/stapled with another amino acid residue comprising an olefin group to form a staple through the olefin group
  SITE 3: note = (S)-2-amino-4,4-dimethylpentanoic acid
  VARIANT 4: note = 2-amino-2-(pent-4-en-1-yl)hept-6-enoic acid, useful for stapling/stapled with another amino acid residue comprising an olefin group to form a staple through one of the two olefin groups and/or with another amino acid residue comprising an olefin group to form a staple through the other of the two olefin groups
  SITE 6: note = (S)-3-(2-amino-2-carboxyethyl)benzoic acid
  SITE 7: note = 2-amino-2-methylpropanoic acid
  SITE 9: note = (S)-2-amino-3-(naphthalen-1-yl)propanoic acid
  SITE 10: note = L-lysine, useful for stapling/stapled with another amino acid residue comprising a side chain acid group to form a staple through the 6-amino group
  SITE 11: note (S)-3-amino-1-((pent-4-en-1-yloxy)carbonyl)pyrrolidine-3-ca rboxylic acid, useful for stapling/stapled with another amino acid residue comprising an olefin group to form a staple through the olefin group
  SITE 12: note = (S)-2-amino-3-(thiophen-3-yl)propanoic acid
  SITE 13: note = (S)-2-amino-3-(benzo[b]thiophen-3-yl)propanoic acid
  SITE 14: note = L-glutamic acid, useful for stapling/stapled with another amino acid residue comprising a side chain amino group to form a staple through the 4-carboxyl group
  SITE 15: note = C-term amino
XDXXDXXAXKXXXEA

SEQ ID NO: 305 - protein, 15 aa, synthetic construct
  SITE 1: note = N-term Acetic Acid
  SITE 1: note = (R)-2-allylpyrrolidine-2-carboxylic acid, useful for stapling/stapled with another amino acid residue comprising an olefin group to form a staple through the olefin group
  SITE 3: note = (S)-2-amino-4,4-dimethylpentanoic acid
  VARIANT 4: note = 2-amino-2-(pent-4-en-1-yl)hept-6-enoic acid, useful for stapling/stapled with another amino acid residue comprising an olefin group to form a staple through one of the two olefin groups and/or with another amino acid residue comprising an olefin group to form a staple through the other of the two olefin groups
  SITE 6: note = (S)-3-(2-amino-2-carboxyethyl)benzoic acid
  SITE 7: note = 2-amino-2-methylpropanoic acid
  SITE 9: note = (S)-2-amino-3-(naphthalen-2-yl)propanoic acid
  SITE 10: note = L-lysine, useful for stapling/stapled with another amino acid residue comprising a side chain acid group to form a staple through the 6-amino group
  SITE 11: note (S)-3-amino-1-((pent-4-en-1-yloxy)carbonyl)pyrrolidine-3-ca rboxylic acid, useful for stapling/stapled with another amino acid residue comprising an olefin group to form a staple through the olefin group
  SITE 12: note = (S)-2-amino-3-(thiophen-3-yl)propanoic acid
  SITE 13: note = (S)-2-amino-3-(benzo[b]thiophen-3-yl)propanoic acid
  SITE 14: note = L-glutamic acid, useful for stapling/stapled with another amino acid residue comprising a side chain amino group to form a staple through the 4-carboxyl group
  SITE 15: note = C-term amino
XDXXDXXAXKXXXEA

SEQ ID NO: 306 - protein, 15 aa, synthetic construct
  SITE 1: note = N-term Acetic Acid
  SITE 1: note = (R)-2-allylpyrrolidine-2-carboxylic acid, useful for stapling/stapled with another amino acid residue comprising an olefin group to form a staple through the olefin group
  SITE 3: note = (S)-2-amino-4,4-dimethylpentanoic acid
  VARIANT 4: note = 2-amino-2-(pent-4-en-1-yl)hept-6-enoic acid, useful for stapling/stapled with another amino acid residue comprising an olefin group to form a staple through one of the two olefin groups and/or with another amino acid residue comprising an olefin group to form a staple through the other of the two olefin groups
  SITE 6: note = (S)-3-(2-amino-2-carboxyethyl)benzoic acid
  SITE 7: note = 2-amino-2-methylpropanoic acid
  SITE 10: note = L-lysine, useful for stapling/stapled with another amino acid residue comprising a side chain acid group to form a staple through the 6-amino group
  SITE 11: note (S)-3-amino-1-((pent-4-en-1-yloxy)carbonyl)pyrrolidine-3-ca rboxylic acid, useful for stapling/stapled with another amino acid residue comprising an olefin group to form a staple through the olefin group
  SITE 12: note = (S)-2-amino-3-(thiophen-3-yl)propanoic acid
  SITE 13: note = (S)-2-amino-3-(benzo[b]thiophen-3-yl)propanoic acid
  SITE 14: note = L-glutamic acid, useful for stapling/stapled with another amino acid residue comprising a side chain amino group to form a staple through the 4-carboxyl group
  SITE 15: note = C-term amino
XDXXDXXAYKXXXEA

SEQ ID NO: 307 - protein, 15 aa, synthetic construct
  SITE 1: note = N-term Acetic Acid
  SITE 1: note = (R)-2-allylpyrrolidine-2-carboxylic acid, useful for stapling/stapled with another amino acid residue comprising an olefin group to form a staple through the olefin group
  SITE 3: note = (S)-2-amino-4,4-dimethylpentanoic acid
  VARIANT 4: note = 2-amino-2-(pent-4-en-1-yl)hept-6-enoic acid, useful for stapling/stapled with another amino acid residue comprising an olefin group to form a staple through one of the two olefin groups and/or with another amino acid residue comprising an olefin group to form a staple through the other of the two olefin groups
  SITE 6: note = (S)-3-(2-amino-2-carboxyethyl)benzoic acid
  SITE 7: note = 2-amino-2-methylpropanoic acid
  SITE 10: note = L-lysine, useful for stapling/stapled with another amino acid residue comprising a side chain acid group to form a staple through the 6-amino group
  SITE 11: note (S)-3-amino-1-((pent-4-en-1-yloxy)carbonyl)pyrrolidine-3-ca rboxylic acid, useful for stapling/stapled with another amino acid residue comprising an olefin group to form a staple through the olefin group
  SITE 12: note = (S)-2-amino-3-(thiophen-3-yl)propanoic acid
  SITE 13: note = (S)-2-amino-3-(benzo[b]thiophen-3-yl)propanoic acid
  SITE 14: note = L-glutamic acid, useful for stapling/stapled with another amino acid residue comprising a side chain amino group to form a staple through the 4-carboxyl group
  SITE 15: note = C-term amino
XDXXDXXAWKXXXEA

SEQ ID NO: 308 - protein, 15 aa, synthetic construct
  SITE 1: note = N-term Acetic Acid
  SITE 1: note = (R)-2-allylpyrrolidine-2-carboxylic acid, useful for stapling/stapled with another amino acid residue comprising an olefin group to form a staple through the olefin group
  SITE 3: note = (S)-2-amino-4,4-dimethylpentanoic acid
  VARIANT 4: note = 2-amino-2-(pent-4-en-1-yl)hept-6-enoic acid, useful for stapling/stapled with another amino acid residue comprising an olefin group to form a staple through one of the two olefin groups and/or with another amino acid residue comprising an olefin group to form a staple through the other of the two olefin groups
  SITE 6: note = (S)-3-(2-amino-2-carboxyethyl)benzoic acid
  SITE 7: note = 2-amino-2-methylpropanoic acid
  SITE 10: note = L-lysine, useful for stapling/stapled with another amino acid residue comprising a side chain acid group to form a staple through the 6-amino group
  SITE 11: note (S)-3-amino-1-((pent-4-en-1-yloxy)carbonyl)pyrrolidine-3-ca rboxylic acid, useful for stapling/stapled with another amino acid residue comprising an olefin group to form a staple through the olefin group
  SITE 12: note = (S)-2-amino-3-(thiophen-3-yl)propanoic acid
  SITE 13: note = (S)-2-amino-3-(benzo[b]thiophen-3-yl)propanoic acid
  SITE 14: note = L-glutamic acid, useful for stapling/stapled with another amino acid residue comprising a side chain amino group to form a staple through the 4-carboxyl group
  SITE 15: note = C-term amino
XDXXDXXALKXXXEA

SEQ ID NO: 309 - protein, 15 aa, synthetic construct
  SITE 1: note = N-term Acetic Acid
  SITE 1: note = (R)-2-allylpyrrolidine-2-carboxylic acid, useful for stapling/stapled with another amino acid residue comprising an olefin group to form a staple through the olefin group
  SITE 3: note = (S)-2-amino-4,4-dimethylpentanoic acid
  VARIANT 4: note = 2-amino-2-(pent-4-en-1-yl)hept-6-enoic acid, useful for stapling/stapled with another amino acid residue comprising an olefin group to form a staple through one of the two olefin groups and/or with another amino acid residue comprising an olefin group to form a staple through the other of the two olefin groups
  SITE 6: note = (S)-3-(2-amino-2-carboxyethyl)benzoic acid
  SITE 7: note = 2-amino-2-methylpropanoic acid
  SITE 10: note = L-lysine, useful for stapling/stapled with another amino acid residue comprising a side chain acid group to form a staple through the 6-amino group
  SITE 11: note (S)-3-amino-1-((pent-4-en-1-yloxy)carbonyl)pyrrolidine-3-ca rboxylic acid, useful for stapling/stapled with another amino acid residue comprising an olefin group to form a staple through the olefin group
  SITE 12: note = (S)-2-amino-3-(thiophen-3-yl)propanoic acid
  SITE 13: note = (S)-2-amino-3-(benzo[b]thiophen-3-yl)propanoic acid
  SITE 14: note = L-glutamic acid, useful for stapling/stapled with another amino acid residue comprising a side chain amino group to form a staple through the 4-carboxyl group
  SITE 15: note = C-term amino
XDXXDXXAIKXXXEA

SEQ ID NO: 310 - protein, 15 aa, synthetic construct
  SITE 1: note = N-term Acetic Acid
  SITE 1: note = (R)-2-allylpyrrolidine-2-carboxylic acid, useful for stapling/stapled with another amino acid residue comprising an olefin group to form a staple through the olefin group
  SITE 3: note = (S)-2-amino-4,4-dimethylpentanoic acid
  VARIANT 4: note = 2-amino-2-(pent-4-en-1-yl)hept-6-enoic acid, useful for stapling/stapled with another amino acid residue comprising an olefin group to form a staple through one of the two olefin groups and/or with another amino acid residue comprising an olefin group to form a staple through the other of the two olefin groups
  SITE 6: note = (S)-3-(2-amino-2-carboxyethyl)benzoic acid
  SITE 7: note = 2-amino-2-methylpropanoic acid
  SITE 9: note = (S)-2-aminohexanoic acid
  SITE 10: note = L-lysine, useful for stapling/stapled with another amino acid residue comprising a side chain acid group to form a staple through the 6-amino group
  SITE 11: note (S)-3-amino-1-((pent-4-en-1-yloxy)carbonyl)pyrrolidine-3-ca rboxylic acid, useful for stapling/stapled with another amino acid residue comprising an olefin group to form a staple through the olefin group
  SITE 12: note = (S)-2-amino-3-(thiophen-3-yl)propanoic acid
  SITE 13: note = (S)-2-amino-3-(benzo[b]thiophen-3-yl)propanoic acid
  SITE 14: note = L-glutamic acid, useful for stapling/stapled with another amino acid residue comprising a side chain amino group to form a staple through the 4-carboxyl group
  SITE 15: note = C-term amino
XDXXDXXAXKXXXEA

SEQ ID NO: 311 - protein, 15 aa, synthetic construct
  SITE 1: note = N-term Acetic Acid
  SITE 1: note = (R)-2-allylpyrrolidine-2-carboxylic acid, useful for stapling/stapled with another amino acid residue comprising an olefin group to form a staple through the olefin group
  SITE 3: note = (S)-2-amino-4,4-dimethylpentanoic acid
  VARIANT 4: note = 2-amino-2-(pent-4-en-1-yl)hept-6-enoic acid, useful for stapling/stapled with another amino acid residue comprising an olefin group to form a staple through one of the two olefin groups and/or with another amino acid residue comprising an olefin group to form a staple through the other of the two olefin groups
  SITE 6: note = (S)-3-(2-amino-2-carboxyethyl)benzoic acid
  SITE 7: note = 2-amino-2-methylpropanoic acid
  SITE 10: note = L-lysine, useful for stapling/stapled with another amino acid residue comprising a side chain acid group to form a staple through the 6-amino group
  SITE 11: note (S)-3-amino-1-((pent-4-en-1-yloxy)carbonyl)pyrrolidine-3-ca rboxylic acid, useful for stapling/stapled with another amino acid residue comprising an olefin group to form a staple through the olefin group
  SITE 12: note = (S)-2-amino-3-(thiophen-3-yl)propanoic acid
  SITE 13: note = (S)-2-amino-3-(benzo[b]thiophen-3-yl)propanoic acid
  SITE 14: note = L-glutamic acid, useful for stapling/stapled with another amino acid residue comprising a side chain amino group to form a staple through the 4-carboxyl group
  SITE 15: note = C-term amino
XDXXDXXASKXXXEA

SEQ ID NO: 312 - protein, 15 aa, synthetic construct
  SITE 1: note = N-term Acetic Acid
  SITE 1: note = (R)-2-allylpyrrolidine-2-carboxylic acid, useful for stapling/stapled with another amino acid residue comprising an olefin group to form a staple through the olefin group
  SITE 3: note = (S)-2-amino-4,4-dimethylpentanoic acid
  VARIANT 4: note = 2-amino-2-(pent-4-en-1-yl)hept-6-enoic acid, useful for stapling/stapled with another amino acid residue comprising an olefin group to form a staple through one of the two olefin groups and/or with another amino acid residue comprising an olefin group to form a staple through the other of the two olefin groups
  SITE 6: note = (S)-3-(2-amino-2-carboxyethyl)benzoic acid
  SITE 7: note = 2-amino-2-methylpropanoic acid
  SITE 9: note = (S)-2-amino-3-(thiophen-3-yl)propanoic acid
  SITE 10: note = L-lysine, useful for stapling/stapled with another amino acid residue comprising a side chain acid group to form a staple through the 6-amino group
  SITE 11: note (S)-3-amino-1-((pent-4-en-1-yloxy)carbonyl)pyrrolidine-3-ca rboxylic acid, useful for stapling/stapled with another amino acid residue comprising an olefin group to form a staple through the olefin group
  SITE 12: note = (S)-2-amino-3-(thiophen-3-yl)propanoic acid
  SITE 13: note = (S)-2-amino-3-(benzo[b]thiophen-3-yl)propanoic acid
  SITE 14: note = L-glutamic acid, useful for stapling/stapled with another amino acid residue comprising a side chain amino group to form a staple through the 4-carboxyl group
  SITE 15: note = C-term amino
XDXXDXXAXKXXXEA

SEQ ID NO: 313 - protein, 15 aa, synthetic construct
  SITE 1: note = N-term Acetic Acid
  SITE 1: note = (R)-2-allylpyrrolidine-2-carboxylic acid, useful for stapling/stapled with another amino acid residue comprising an olefin group to form a staple through the olefin group
  SITE 3: note = (S)-2-amino-4,4-dimethylpentanoic acid
  VARIANT 4: note = 2-amino-2-(pent-4-en-1-yl)hept-6-enoic acid, useful for stapling/stapled with another amino acid residue comprising an olefin group to form a staple through one of the two olefin groups and/or with another amino acid residue comprising an olefin group to form a staple through the other of the two olefin groups
  SITE 6: note = (S)-3-(2-amino-2-carboxyethyl)benzoic acid
  SITE 7: note = 2-amino-2-methylpropanoic acid
  SITE 9: note = (S)-2-amino-3-(thiophen-2-yl)propanoic acid
  SITE 10: note = L-lysine, useful for stapling/stapled with another amino acid residue comprising a side chain acid group to form a staple through the 6-amino group
  SITE 11: note (S)-3-amino-1-((pent-4-en-1-yloxy)carbonyl)pyrrolidine-3-ca rboxylic acid, useful for stapling/stapled with another amino acid residue comprising an olefin group to form a staple through the olefin group
  SITE 12: note = (S)-2-amino-3-(thiophen-3-yl)propanoic acid
  SITE 13: note = (S)-2-amino-3-(benzo[b]thiophen-3-yl)propanoic acid
  SITE 14: note = L-glutamic acid, useful for stapling/stapled with another amino acid residue comprising a side chain amino group to form a staple through the 4-carboxyl group
  SITE 15: note = C-term amino
XDXXDXXAXKXXXEA

SEQ ID NO: 314 - protein, 15 aa, synthetic construct
  SITE 1: note = N-term Acetic Acid
  SITE 1: note = (R)-2-allylpyrrolidine-2-carboxylic acid, useful for stapling/stapled with another amino acid residue comprising an olefin group to form a staple through the olefin group
  SITE 3: note = (S)-2-amino-4,4-dimethylpentanoic acid
  VARIANT 4: note = 2-amino-2-(pent-4-en-1-yl)hept-6-enoic acid, useful for stapling/stapled with another amino acid residue comprising an olefin group to form a staple through one of the two olefin groups and/or with another amino acid residue comprising an olefin group to form a staple through the other of the two olefin groups
  SITE 6: note = (S)-3-(2-amino-2-carboxyethyl)benzoic acid
  SITE 7: note = 2-amino-2-methylpropanoic acid
  SITE 9: note = (S)-2-amino-2-cyclohexylacetic acid
  SITE 10: note = L-lysine, useful for stapling/stapled with another amino acid residue comprising a side chain acid group to form a staple through the 6-amino group
  SITE 11: note (S)-3-amino-1-((pent-4-en-1-yloxy)carbonyl)pyrrolidine-3-ca rboxylic acid, useful for stapling/stapled with another amino acid residue comprising an olefin group to form a staple through the olefin group
  SITE 12: note = (S)-2-amino-3-(thiophen-3-yl)propanoic acid
  SITE 13: note = (S)-2-amino-3-(benzo[b]thiophen-3-yl)propanoic acid
  SITE 14: note = L-glutamic acid, useful for stapling/stapled with another amino acid residue comprising a side chain amino group to form a staple through the 4-carboxyl group
  SITE 15: note = C-term amino
XDXXDXXAXKXXXEA

SEQ ID NO: 315 - protein, 15 aa, synthetic construct
  SITE 1: note = N-term Acetic Acid
  SITE 1: note = (R)-2-allylpyrrolidine-2-carboxylic acid, useful for stapling/stapled with another amino acid residue comprising an olefin group to form a staple through the olefin group
  SITE 3: note = (S)-2-amino-4,4-dimethylpentanoic acid
  VARIANT 4: note = 2-amino-2-(pent-4-en-1-yl)hept-6-enoic acid, useful for stapling/stapled with another amino acid residue comprising an olefin group to form a staple through one of the two olefin groups and/or with another amino acid residue comprising an olefin group to form a staple through the other of the two olefin groups
  SITE 6: note = (S)-3-(2-amino-2-carboxyethyl)benzoic acid
  SITE 7: note = 2-amino-2-methylpropanoic acid
  SITE 9: note = L-homoserine
  SITE 10: note = L-lysine, useful for stapling/stapled with another amino acid residue comprising a side chain acid group to form a staple through the 6-amino group
  SITE 11: note (S)-3-amino-1-((pent-4-en-1-yloxy)carbonyl)pyrrolidine-3-ca rboxylic acid, useful for stapling/stapled with another amino acid residue comprising an olefin group to form a staple through the olefin group
  SITE 12: note = (S)-2-amino-3-(thiophen-3-yl)propanoic acid
  SITE 13: note = (S)-2-amino-3-(benzo[b]thiophen-3-yl)propanoic acid
  SITE 14: note = L-glutamic acid, useful for stapling/stapled with another amino acid residue comprising a side chain amino group to form a staple through the 4-carboxyl group
  SITE 15: note = C-term amino
XDXXDXXASKXXXEA

SEQ ID NO: 316 - protein, 15 aa, synthetic construct
  SITE 1: note = N-term Acetic Acid
  SITE 1: note = (R)-2-allylpyrrolidine-2-carboxylic acid, useful for stapling/stapled with another amino acid residue comprising an olefin group to form a staple through the olefin group
  SITE 3: note = (S)-2-amino-4,4-dimethylpentanoic acid
  VARIANT 4: note = 2-amino-2-(pent-4-en-1-yl)hept-6-enoic acid, useful for stapling/stapled with another amino acid residue comprising an olefin group to form a staple through one of the two olefin groups and/or with another amino acid residue comprising an olefin group to form a staple through the other of the two olefin groups
  SITE 6: note = (S)-3-(2-amino-2-carboxyethyl)benzoic acid
  SITE 7: note = 2-amino-2-methylpropanoic acid
  SITE 9: note = (S)-2-amino-3-(1H-1,2,3-triazol-4-yl)propanoic acid
  SITE 10: note = L-lysine, useful for stapling/stapled with another amino acid residue comprising a side chain acid group to form a staple through the 6-amino group
  SITE 11: note (S)-3-amino-1-((pent-4-en-1-yloxy)carbonyl)pyrrolidine-3-ca rboxylic acid, useful for stapling/stapled with another amino acid residue comprising an olefin group to form a staple through the olefin group
  SITE 12: note = (S)-2-amino-3-(thiophen-3-yl)propanoic acid
  SITE 13: note = (S)-2-amino-3-(benzo[b]thiophen-3-yl)propanoic acid
  SITE 14: note = L-glutamic acid, useful for stapling/stapled with another amino acid residue comprising a side chain amino group to form a staple through the 4-carboxyl group
  SITE 15: note = C-term amino
XDXXDXXAXKXXXEA

SEQ ID NO: 317 - protein, 15 aa, synthetic construct
  SITE 1: note = N-term Acetic Acid
  SITE 1: note = (R)-2-allylpyrrolidine-2-carboxylic acid, useful for stapling/stapled with another amino acid residue comprising an olefin group to form a staple through the olefin group
  SITE 3: note = (S)-2-amino-4,4-dimethylpentanoic acid
  VARIANT 4: note = 2-amino-2-(pent-4-en-1-yl)hept-6-enoic acid, useful for stapling/stapled with another amino acid residue comprising an olefin group to form a staple through one of the two olefin groups and/or with another amino acid residue comprising an olefin group to form a staple through the other of the two olefin groups
  SITE 6: note = (S)-3-(2-amino-2-carboxyethyl)benzoic acid
  SITE 7: note = 2-amino-2-methylpropanoic acid
  SITE 9: note = (S)-2-amino-3-(3-(trifluoromethyl)phenyl)propanoic acid
  SITE 10: note = L-lysine, useful for stapling/stapled with another amino acid residue comprising a side chain acid group to form a staple through the 6-amino group
  SITE 11: note (S)-3-amino-1-((pent-4-en-1-yloxy)carbonyl)pyrrolidine-3-ca rboxylic acid, useful for stapling/stapled with another amino acid residue comprising an olefin group to form a staple through the olefin group
  SITE 12: note = (S)-2-amino-3-(thiophen-3-yl)propanoic acid
  SITE 13: note = (S)-2-amino-3-(benzo[b]thiophen-3-yl)propanoic acid
  SITE 14: note = L-glutamic acid, useful for stapling/stapled with another amino acid residue comprising a side chain amino group to form a staple through the 4-carboxyl group
  SITE 15: note = C-term amino
XDXXDXXAXKXXXEA

SEQ ID NO: 318 - protein, 15 aa, synthetic construct
  SITE 1: note = N-term Acetic Acid
  SITE 1: note = (R)-2-allylpyrrolidine-2-carboxylic acid, useful for stapling/stapled with another amino acid residue comprising an olefin group to form a staple through the olefin group
  SITE 3: note = (S)-2-amino-4,4-dimethylpentanoic acid
  VARIANT 4: note = 2-amino-2-(pent-4-en-1-yl)hept-6-enoic acid, useful for stapling/stapled with another amino acid residue comprising an olefin group to form a staple through one of the two olefin groups and/or with another amino acid residue comprising an olefin group to form a staple through the other of the two olefin groups
  SITE 6: note = (S)-3-(2-amino-2-carboxyethyl)benzoic acid
  SITE 7: note = 2-amino-2-methylpropanoic acid
  SITE 10: note = L-lysine, useful for stapling/stapled with another amino acid residue comprising a side chain acid group to form a staple through the 6-amino group
  SITE 11: note (S)-3-amino-1-((pent-4-en-1-yloxy)carbonyl)pyrrolidine-3-ca rboxylic acid, useful for stapling/stapled with another amino acid residue comprising an olefin group to form a staple through the olefin group
  SITE 12: note = (S)-2-amino-3-(thiophen-3-yl)propanoic acid
  SITE 13: note = (S)-2-amino-3-(benzo[b]thiophen-3-yl)propanoic acid
  SITE 14: note = L-glutamic acid, useful for stapling/stapled with another amino acid residue comprising a side chain amino group to form a staple through the 4-carboxyl group
  SITE 15: note = C-term amino
XDXXDXXATKXXXEA

SEQ ID NO: 319 - protein, 15 aa, synthetic construct
  SITE 1: note = N-term Acetic Acid
  SITE 1: note = (R)-2-allylpyrrolidine-2-carboxylic acid, useful for stapling/stapled with another amino acid residue comprising an olefin group to form a staple through the olefin group
  SITE 3: note = (S)-2-amino-4,4-dimethylpentanoic acid
  VARIANT 4: note = 2-amino-2-(pent-4-en-1-yl)hept-6-enoic acid, useful for stapling/stapled with another amino acid residue comprising an olefin group to form a staple through one of the two olefin groups and/or with another amino acid residue comprising an olefin group to form a staple through the other of the two olefin groups
  SITE 6: note = (S)-3-(2-amino-2-carboxyethyl)benzoic acid
  SITE 7: note = 2-amino-2-methylpropanoic acid
  SITE 10: note = L-lysine, useful for stapling/stapled with another amino acid residue comprising a side chain acid group to form a staple through the 6-amino group
  SITE 11: note (S)-3-amino-1-((pent-4-en-1-yloxy)carbonyl)pyrrolidine-3-ca rboxylic acid, useful for stapling/stapled with another amino acid residue comprising an olefin group to form a staple through the olefin group
  SITE 12: note = (S)-2-amino-3-(thiophen-3-yl)propanoic acid
  SITE 13: note = (S)-2-amino-3-(benzo[b]thiophen-3-yl)propanoic acid
  SITE 14: note = L-glutamic acid, useful for stapling/stapled with another amino acid residue comprising a side chain amino group to form a staple through the 4-carboxyl group
  SITE 15: note = C-term amino
XDXXDXXAHKXXXEA

SEQ ID NO: 320 - protein, 15 aa, synthetic construct
  SITE 1: note = N-term Acetic Acid
  SITE 1: note = (R)-2-allylpyrrolidine-2-carboxylic acid, useful for stapling/stapled with another amino acid residue comprising an olefin group to form a staple through the olefin group
  SITE 3: note = (S)-2-amino-4,4-dimethylpentanoic acid
  VARIANT 4: note = 2-amino-2-(pent-4-en-1-yl)hept-6-enoic acid, useful for stapling/stapled with another amino acid residue comprising an olefin group to form a staple through one of the two olefin groups and/or with another amino acid residue comprising an olefin group to form a staple through the other of the two olefin groups
  SITE 6: note = (S)-3-(2-amino-2-carboxyethyl)benzoic acid
  SITE 7: note = 2-amino-2-methylpropanoic acid
  SITE 10: note = L-lysine, useful for stapling/stapled with another amino acid residue comprising a side chain acid group to form a staple through the 6-amino group
  SITE 11: note (S)-3-amino-1-((pent-4-en-1-yloxy)carbonyl)pyrrolidine-3-ca rboxylic acid, useful for stapling/stapled with another amino acid residue comprising an olefin group to form a staple through the olefin group
  SITE 12: note = (S)-2-amino-3-(thiophen-3-yl)propanoic acid
  SITE 13: note = (S)-2-amino-3-(benzo[b]thiophen-3-yl)propanoic acid
  SITE 14: note = L-glutamic acid, useful for stapling/stapled with another amino acid residue comprising a side chain amino group to form a staple through the 4-carboxyl group
  SITE 15: note = C-term amino
XDXXDXXAVKXXXEA

SEQ ID NO: 321 - protein, 15 aa, synthetic construct
  SITE 1: note = N-term Acetic Acid
  SITE 1: note = (R)-2-allylpyrrolidine-2-carboxylic acid, useful for stapling/stapled with another amino acid residue comprising an olefin group to form a staple through the olefin group
  SITE 3: note = (S)-2-amino-4,4-dimethylpentanoic acid
  VARIANT 4: note = 2-amino-2-(pent-4-en-1-yl)hept-6-enoic acid, useful for stapling/stapled with another amino acid residue comprising an olefin group to form a staple through one of the two olefin groups and/or with another amino acid residue comprising an olefin group to form a staple through the other of the two olefin groups
  SITE 6: note = (S)-3-(2-amino-2-carboxyethyl)benzoic acid
  SITE 7: note = 2-amino-2-methylpropanoic acid
  SITE 10: note = L-lysine, useful for stapling/stapled with another amino acid residue comprising a side chain acid group to form a staple through the 6-amino group
  SITE 11: note (S)-3-amino-1-((pent-4-en-1-yloxy)carbonyl)pyrrolidine-3-ca rboxylic acid, useful for stapling/stapled with another amino acid residue comprising an olefin group to form a staple through the olefin group
  SITE 12: note = (S)-2-amino-3-(thiophen-3-yl)propanoic acid
  SITE 13: note = (S)-2-amino-3-(benzo[b]thiophen-3-yl)propanoic acid
  SITE 14: note = L-glutamic acid, useful for stapling/stapled with another amino acid residue comprising a side chain amino group to form a staple through the 4-carboxyl group
  SITE 15: note = C-term amino
XDXXDXXANKXXXEA

SEQ ID NO: 322 - protein, 15 aa, synthetic construct
  SITE 1: note = N-term Acetic Acid
  SITE 1: note = (R)-2-allylpyrrolidine-2-carboxylic acid, useful for stapling/stapled with another amino acid residue comprising an olefin group to form a staple through the olefin group
  SITE 3: note = (S)-2-amino-4,4-dimethylpentanoic acid
  VARIANT 4: note = 2-amino-2-(pent-4-en-1-yl)hept-6-enoic acid, useful for stapling/stapled with another amino acid residue comprising an olefin group to form a staple through one of the two olefin groups and/or with another amino acid residue comprising an olefin group to form a staple through the other of the two olefin groups
  SITE 6: note = (S)-3-(2-amino-2-carboxyethyl)benzoic acid
  SITE 7: note = 2-amino-2-methylpropanoic acid
  SITE 10: note = L-lysine, useful for stapling/stapled with another amino acid residue comprising a side chain acid group to form a staple through the 6-amino group
  SITE 11: note (S)-3-amino-1-((pent-4-en-1-yloxy)carbonyl)pyrrolidine-3-ca rboxylic acid, useful for stapling/stapled with another amino acid residue comprising an olefin group to form a staple through the olefin group
  SITE 12: note = (S)-2-amino-3-(thiophen-3-yl)propanoic acid
  SITE 13: note = (S)-2-amino-3-(benzo[b]thiophen-3-yl)propanoic acid
  SITE 14: note = L-glutamic acid, useful for stapling/stapled with another amino acid residue comprising a side chain amino group to form a staple through the 4-carboxyl group
  SITE 15: note = C-term amino
XDXXDXXAQKXXXEA

SEQ ID NO: 323 - protein, 15 aa, synthetic construct
  SITE 1: note = N-term Acetic Acid
  SITE 1: note = (R)-2-allylpyrrolidine-2-carboxylic acid, useful for stapling/stapled with another amino acid residue comprising an olefin group to form a staple through the olefin group
  SITE 3: note = (S)-2-amino-4,4-dimethylpentanoic acid
  VARIANT 4: note = 2-amino-2-(pent-4-en-1-yl)hept-6-enoic acid, useful for stapling/stapled with another amino acid residue comprising an olefin group to form a staple through one of the two olefin groups and/or with another amino acid residue comprising an olefin group to form a staple through the other of the two olefin groups
  SITE 6: note = (S)-3-(2-amino-2-carboxyethyl)benzoic acid
  SITE 7: note = 2-amino-2-methylpropanoic acid
  SITE 10: note = Cysteine, sulfur bonded to the methyl at position 1 of 1,3-dimethylbenzene, useful for stapling/stapled with another thiol through the methyl at position 3 of 1,3-dimethylbenzene
  SITE 11: note (S)-3-amino-1-((pent-4-en-1-yloxy)carbonyl)pyrrolidine-3-ca rboxylic acid, useful for stapling/stapled with another amino acid residue comprising an olefin group to form a staple through the olefin group
  SITE 12: note = (S)-2-amino-3-(2-(trifluoromethyl)phenyl)propanoic acid
  SITE 13: note = (S)-2-amino-3-(benzo[b]thiophen-3-yl)propanoic acid
  SITE 15: note = C-term amino
XDXXDXXAFCXXXCA

SEQ ID NO: 324 - protein, 15 aa, synthetic construct
  SITE 1: note = N-term Acetic Acid
  SITE 1: note = (R)-2-allylpyrrolidine-2-carboxylic acid, useful for stapling/stapled with another amino acid residue comprising an olefin group to form a staple through the olefin group
  SITE 3: note = (S)-2-amino-4,4-dimethylpentanoic acid
  VARIANT 4: note = 2-amino-2-(pent-4-en-1-yl)hept-6-enoic acid, useful for stapling/stapled with another amino acid residue comprising an olefin group to form a staple through one of the two olefin groups and/or with another amino acid residue comprising an olefin group to form a staple through the other of the two olefin groups
  SITE 6: note = (S)-3-(2-amino-2-carboxyethyl)benzoic acid
  SITE 7: note = 2-amino-2-methylpropanoic acid
  SITE 10: note = Cysteine, sulfur bonded to the methyl at position 1 of 1,2-dimethylbenzene, useful for stapling/stapled with another thiol through the methyl at position 2 of 1,2-dimethylbenzene
  SITE 11: note (S)-3-amino-1-((pent-4-en-1-yloxy)carbonyl)pyrrolidine-3-ca rboxylic acid, useful for stapling/stapled with another amino acid residue comprising an olefin group to form a staple through the olefin group
  SITE 12: note = (S)-2-amino-3-(2-(trifluoromethyl)phenyl)propanoic acid
  SITE 13: note = (S)-2-amino-3-(benzo[b]thiophen-3-yl)propanoic acid
  SITE 15: note = C-term amino
XDXXDXXAFCXXXCA

SEQ ID NO: 325 - protein, 15 aa, synthetic construct
  SITE 1: note = N-term Acetic Acid
  SITE 1: note = (R)-2-allylpyrrolidine-2-carboxylic acid, useful for stapling/stapled with another amino acid residue comprising an olefin group to form a staple through the olefin group
  SITE 3: note = (S)-2-amino-4,4-dimethylpentanoic acid
  VARIANT 4: note = 2-amino-2-(pent-4-en-1-yl)hept-6-enoic acid, useful for stapling/stapled with another amino acid residue comprising an olefin group to form a staple through one of the two olefin groups and/or with another amino acid residue comprising an olefin group to form a staple through the other of the two olefin groups
  SITE 6: note = (S)-3-(2-amino-2-carboxyethyl)benzoic acid
  SITE 7: note = 2-amino-2-methylpropanoic acid
  SITE 10: note = Cysteine, sulfur bonded to the methyl at position 1 of 1,4-dimethylbenzene, useful for stapling/stapled with another thiol through the methyl at position 4 of 1,4-dimethylbenzene
  SITE 11: note (S)-3-amino-1-((pent-4-en-1-yloxy)carbonyl)pyrrolidine-3-ca rboxylic acid, useful for stapling/stapled with another amino acid residue comprising an olefin group to form a staple through the olefin group
  SITE 12: note = (S)-2-amino-3-(2-(trifluoromethyl)phenyl)propanoic acid
  SITE 13: note = (S)-2-amino-3-(benzo[b]thiophen-3-yl)propanoic acid
  SITE 15: note = C-term amino
XDXXDXXAFCXXXCA

SEQ ID NO: 326 - protein, 15 aa, synthetic construct
  SITE 1: note = N-term Acetic Acid
  SITE 1: note = (R)-2-allylpyrrolidine-2-carboxylic acid, useful for stapling/stapled with another amino acid residue comprising an olefin group to form a staple through the olefin group
  SITE 3: note = (S)-2-amino-4,4-dimethylpentanoic acid
  VARIANT 4: note = 2-amino-2-(pent-4-en-1-yl)hept-6-enoic acid, useful for stapling/stapled with another amino acid residue comprising an olefin group to form a staple through one of the two olefin groups and/or with another amino acid residue comprising an olefin group to form a staple through the other of the two olefin groups
  SITE 6: note = (S)-3-(2-amino-2-carboxyethyl)benzoic acid
  SITE 7: note = (S)-2-amino-5-morpholino-5-oxopentanoic acid
  SITE 10: note = L-lysine, useful for stapling/stapled with another amino acid residue comprising a side chain acid group to form a staple through the 6-amino group
  SITE 11: note (S)-3-amino-1-((pent-4-en-1-yloxy)carbonyl)pyrrolidine-3-ca rboxylic acid, useful for stapling/stapled with another amino acid residue comprising an olefin group to form a staple through the olefin group
  SITE 12: note = (S)-2-amino-3-(thiophen-3-yl)propanoic acid
  SITE 13: note = (S)-2-amino-3-(benzo[b]thiophen-3-yl)propanoic acid
  SITE 14: note = L-glutamic acid, useful for stapling/stapled with another amino acid residue comprising a side chain amino group to form a staple through the 4-carboxyl group
  SITE 15: note = C-term amino
XDXXDXXAFKXXXEA

SEQ ID NO: 327 - protein, 15 aa, synthetic construct
  SITE 1: note = N-term Acetic Acid
  SITE 1: note = (R)-2-allylpyrrolidine-2-carboxylic acid, useful for stapling/stapled with another amino acid residue comprising an olefin group to form a staple through the olefin group
  SITE 3: note = (S)-2-amino-4,4-dimethylpentanoic acid
  VARIANT 4: note = 2-amino-2-(pent-4-en-1-yl)hept-6-enoic acid, useful for stapling/stapled with another amino acid residue comprising an olefin group to form a staple through one of the two olefin groups and/or with another amino acid residue comprising an olefin group to form a staple through the other of the two olefin groups
  SITE 6: note = (S)-3-(2-amino-2-carboxyethyl)benzoic acid
  SITE 7: note = N5,N5-dimethyl-L-glutamine
  SITE 10: note = L-lysine, useful for stapling/stapled with another amino acid residue comprising a side chain acid group to form a staple through the 6-amino group
  SITE 11: note (S)-3-amino-1-((pent-4-en-1-yloxy)carbonyl)pyrrolidine-3-ca rboxylic acid, useful for stapling/stapled with another amino acid residue comprising an olefin group to form a staple through the olefin group
  SITE 12: note = (S)-2-amino-3-(thiophen-3-yl)propanoic acid
  SITE 13: note = (S)-2-amino-3-(benzo[b]thiophen-3-yl)propanoic acid
  SITE 14: note = L-glutamic acid, useful for stapling/stapled with another amino acid residue comprising a side chain amino group to form a staple through the 4-carboxyl group
  SITE 15: note = C-term amino
XDXXDXQAFKXXXEA

SEQ ID NO: 328 - protein, 15 aa, synthetic construct
  SITE 1: note = N-term Acetic Acid
  SITE 1: note = (R)-2-allylpyrrolidine-2-carboxylic acid, useful for stapling/stapled with another amino acid residue comprising an olefin group to form a staple through the olefin group
  SITE 3: note = (S)-2-amino-4,4-dimethylpentanoic acid
  VARIANT 4: note = 2-amino-2-(pent-4-en-1-yl)hept-6-enoic acid, useful for stapling/stapled with another amino acid residue comprising an olefin group to form a staple through one of the two olefin groups and/or with another amino acid residue comprising an olefin group to form a staple through the other of the two olefin groups
  SITE 6: note = (S)-3-(2-amino-2-carboxyethyl)benzoic acid
  SITE 7: note = (S)-2-amino-4-(methylsulfonyl)butanoic acid
  SITE 10: note = L-lysine, useful for stapling/stapled with another amino acid residue comprising a side chain acid group to form a staple through the 6-amino group
  SITE 11: note (S)-3-amino-1-((pent-4-en-1-yloxy)carbonyl)pyrrolidine-3-ca rboxylic acid, useful for stapling/stapled with another amino acid residue comprising an olefin group to form a staple through the olefin group
  SITE 12: note = (S)-2-amino-3-(thiophen-3-yl)propanoic acid
  SITE 13: note = (S)-2-amino-3-(benzo[b]thiophen-3-yl)propanoic acid
  SITE 14: note = L-glutamic acid, useful for stapling/stapled with another amino acid residue comprising a side chain amino group to form a staple through the 4-carboxyl group
  SITE 15: note = C-term amino
XDXXDXXAFKXXXEA

SEQ ID NO: 329 - protein, 15 aa, synthetic construct
  SITE 1: note = N-term Acetic Acid
  SITE 1: note = (R)-2-allylpyrrolidine-2-carboxylic acid, useful for stapling/stapled with another amino acid residue comprising an olefin group to form a staple through the olefin group
  SITE 3: note = (S)-2-amino-4,4-dimethylpentanoic acid
  VARIANT 4: note = 2-amino-2-(pent-4-en-1-yl)hept-6-enoic acid, useful for stapling/stapled with another amino acid residue comprising an olefin group to form a staple through one of the two olefin groups and/or with another amino acid residue comprising an olefin group to form a staple through the other of the two olefin groups
  SITE 6: note = (S)-3-(2-amino-2-carboxyethyl)benzoic acid
  SITE 7: note = N6-acetyl-L-lysine
  SITE 10: note = L-lysine, useful for stapling/stapled with another amino acid residue comprising a side chain acid group to form a staple through the 6-amino group
  SITE 11: note (S)-3-amino-1-((pent-4-en-1-yloxy)carbonyl)pyrrolidine-3-ca rboxylic acid, useful for stapling/stapled with another amino acid residue comprising an olefin group to form a staple through the olefin group
  SITE 12: note = (S)-2-amino-3-(thiophen-3-yl)propanoic acid
  SITE 13: note = (S)-2-amino-3-(benzo[b]thiophen-3-yl)propanoic acid
  SITE 14: note = L-glutamic acid, useful for stapling/stapled with another amino acid residue comprising a side chain amino group to form a staple through the 4-carboxyl group
  SITE 15: note = C-term amino
XDXXDXKAFKXXXEA

SEQ ID NO: 330 - protein, 15 aa, synthetic construct
  SITE 1: note = N-term Acetic Acid
  SITE 1: note = (R)-2-allylpyrrolidine-2-carboxylic acid, useful for stapling/stapled with another amino acid residue comprising an olefin group to form a staple through the olefin group
  SITE 3: note = (S)-2-amino-4,4-dimethylpentanoic acid
  VARIANT 4: note = 2-amino-2-(pent-4-en-1-yl)hept-6-enoic acid, useful for stapling/stapled with another amino acid residue comprising an olefin group to form a staple through one of the two olefin groups and/or with another amino acid residue comprising an olefin group to form a staple through the other of the two olefin groups
  SITE 6: note = (S)-3-(2-amino-2-carboxyethyl)benzoic acid
  SITE 7: note = 1-aminocyclopentane-1-carboxylic acid
  SITE 10: note = L-lysine, useful for stapling/stapled with another amino acid residue comprising a side chain acid group to form a staple through the 6-amino group
  SITE 11: note (S)-3-amino-1-((pent-4-en-1-yloxy)carbonyl)pyrrolidine-3-ca rboxylic acid, useful for stapling/stapled with another amino acid residue comprising an olefin group to form a staple through the olefin group
  SITE 12: note = (S)-2-amino-3-(thiophen-3-yl)propanoic acid
  SITE 13: note = (S)-2-amino-3-(benzo[b]thiophen-3-yl)propanoic acid
  SITE 14: note = L-glutamic acid, useful for stapling/stapled with another amino acid residue comprising a side chain amino group to form a staple through the 4-carboxyl group
  SITE 15: note = C-term amino
XDXXDXXAFKXXXEA

SEQ ID NO: 331 - protein, 15 aa, synthetic construct
  SITE 1: note = N-term Acetic Acid
  SITE 1: note = (R)-2-allylpyrrolidine-2-carboxylic acid, useful for stapling/stapled with another amino acid residue comprising an olefin group to form a staple through the olefin group
  SITE 3: note = (S)-2-amino-4,4-dimethylpentanoic acid
  VARIANT 4: note = 2-amino-2-(pent-4-en-1-yl)hept-6-enoic acid, useful for stapling/stapled with another amino acid residue comprising an olefin group to form a staple through one of the two olefin groups and/or with another amino acid residue comprising an olefin group to form a staple through the other of the two olefin groups
  SITE 6: note = (S)-3-(2-amino-2-carboxyethyl)benzoic acid
  SITE 7: note = 4-aminopiperidine-4-carboxylic acid, useful for stapling/stapled with another amino acid residue comprising a side chain acid group to form a staple through the piperidinyl group
  SITE 10: note = L-lysine, useful for stapling/stapled with another amino acid residue comprising a side chain acid group to form a staple through the 6-amino group
  SITE 11: note (S)-3-amino-1-((pent-4-en-1-yloxy)carbonyl)pyrrolidine-3-ca rboxylic acid, useful for stapling/stapled with another amino acid residue comprising an olefin group to form a staple through the olefin group
  SITE 12: note = (S)-2-amino-3-(thiophen-3-yl)propanoic acid
  SITE 13: note = (S)-2-amino-3-(benzo[b]thiophen-3-yl)propanoic acid
  SITE 14: note = L-glutamic acid, useful for stapling/stapled with another amino acid residue comprising a side chain amino group to form a staple through the 4-carboxyl group
  SITE 15: note = C-term amino
XDXXDXXAFKXXXEA

SEQ ID NO: 332 - protein, 15 aa, synthetic construct
  SITE 1: note = N-term Acetic Acid
  SITE 1: note = (R)-2-allylpyrrolidine-2-carboxylic acid, useful for stapling/stapled with another amino acid residue comprising an olefin group to form a staple through the olefin group
  SITE 3: note = (S)-2-amino-4,4-dimethylpentanoic acid
  VARIANT 4: note = 2-amino-2-(pent-4-en-1-yl)hept-6-enoic acid, useful for stapling/stapled with another amino acid residue comprising an olefin group to form a staple through one of the two olefin groups and/or with another amino acid residue comprising an olefin group to form a staple through the other of the two olefin groups
  SITE 6: note = (S)-3-(2-amino-2-carboxyethyl)benzoic acid
  SITE 10: note = L-lysine, useful for stapling/stapled with another amino acid residue comprising a side chain acid group to form a staple through the 6-amino group
  SITE 11: note (S)-3-amino-1-((pent-4-en-1-yloxy)carbonyl)pyrrolidine-3-ca rboxylic acid, useful for stapling/stapled with another amino acid residue comprising an olefin group to form a staple through the olefin group
  SITE 12: note = (S)-2-amino-3-(thiophen-3-yl)propanoic acid
  SITE 13: note = (S)-2-amino-3-(benzo[b]thiophen-3-yl)propanoic acid
  SITE 14: note = L-glutamic acid, useful for stapling/stapled with another amino acid residue comprising a side chain amino group to form a staple through the 4-carboxyl group
  SITE 15: note = C-term amino
XDXXDXFAFKXXXEA

SEQ ID NO: 333 - protein, 15 aa, synthetic construct
  SITE 1: note = N-term Acetic Acid
  SITE 1: note = (R)-2-allylpyrrolidine-2-carboxylic acid, useful for stapling/stapled with another amino acid residue comprising an olefin group to form a staple through the olefin group
  SITE 3: note = (S)-2-amino-4,4-dimethylpentanoic acid
  VARIANT 4: note = 2-amino-2-(pent-4-en-1-yl)hept-6-enoic acid, useful for stapling/stapled with another amino acid residue comprising an olefin group to form a staple through one of the two olefin groups and/or with another amino acid residue comprising an olefin group to form a staple through the other of the two olefin groups
  SITE 6: note = (S)-3-(2-amino-2-carboxyethyl)benzoic acid
  SITE 10: note = L-lysine, useful for stapling/stapled with another amino acid residue comprising a side chain acid group to form a staple through the 6-amino group
  SITE 11: note (S)-3-amino-1-((pent-4-en-1-yloxy)carbonyl)pyrrolidine-3-ca rboxylic acid, useful for stapling/stapled with another amino acid residue comprising an olefin group to form a staple through the olefin group
  SITE 12: note = (S)-2-amino-3-(thiophen-3-yl)propanoic acid
  SITE 13: note = (S)-2-amino-3-(benzo[b]thiophen-3-yl)propanoic acid
  SITE 14: note = L-glutamic acid, useful for stapling/stapled with another amino acid residue comprising a side chain amino group to form a staple through the 4-carboxyl group
  SITE 15: note = C-term amino
XDXXDXHAFKXXXEA

SEQ ID NO: 334 - protein, 15 aa, synthetic construct
  SITE 1: note = N-term Acetic Acid
  SITE 1: note = (R)-2-allylpyrrolidine-2-carboxylic acid, useful for stapling/stapled with another amino acid residue comprising an olefin group to form a staple through the olefin group
  SITE 3: note = (S)-2-amino-4,4-dimethylpentanoic acid
  VARIANT 4: note = 2-amino-2-(pent-4-en-1-yl)hept-6-enoic acid, useful for stapling/stapled with another amino acid residue comprising an olefin group to form a staple through one of the two olefin groups and/or with another amino acid residue comprising an olefin group to form a staple through the other of the two olefin groups
  SITE 6: note = (S)-3-(2-amino-2-carboxyethyl)benzoic acid
  SITE 10: note = L-lysine, useful for stapling/stapled with another amino acid residue comprising a side chain acid group to form a staple through the 6-amino group
  SITE 11: note (S)-3-amino-1-((pent-4-en-1-yloxy)carbonyl)pyrrolidine-3-ca rboxylic acid, useful for stapling/stapled with another amino acid residue comprising an olefin group to form a staple through the olefin group
  SITE 12: note = (S)-2-amino-3-(thiophen-3-yl)propanoic acid
  SITE 13: note = (S)-2-amino-3-(benzo[b]thiophen-3-yl)propanoic acid
  SITE 14: note = L-glutamic acid, useful for stapling/stapled with another amino acid residue comprising a side chain amino group to form a staple through the 4-carboxyl group
  SITE 15: note = C-term amino
XDXXDXVAFKXXXEA

SEQ ID NO: 335 - protein, 15 aa, synthetic construct
  SITE 1: note = N-term Acetic Acid
  SITE 1: note = (R)-2-allylpyrrolidine-2-carboxylic acid, useful for stapling/stapled with another amino acid residue comprising an olefin group to form a staple through the olefin group
  SITE 3: note = (S)-2-amino-4,4-dimethylpentanoic acid
  VARIANT 4: note = 2-amino-2-(pent-4-en-1-yl)hept-6-enoic acid, useful for stapling/stapled with another amino acid residue comprising an olefin group to form a staple through one of the two olefin groups and/or with another amino acid residue comprising an olefin group to form a staple through the other of the two olefin groups
  SITE 6: note = (S)-3-(2-amino-2-carboxyethyl)benzoic acid
  SITE 10: note = L-lysine, useful for stapling/stapled with another amino acid residue comprising a side chain acid group to form a staple through the 6-amino group
  SITE 11: note (S)-3-amino-1-((pent-4-en-1-yloxy)carbonyl)pyrrolidine-3-ca rboxylic acid, useful for stapling/stapled with another amino acid residue comprising an olefin group to form a staple through the olefin group
  SITE 12: note = (S)-2-amino-3-(thiophen-3-yl)propanoic acid
  SITE 13: note = (S)-2-amino-3-(benzo[b]thiophen-3-yl)propanoic acid
  SITE 14: note = L-glutamic acid, useful for stapling/stapled with another amino acid residue comprising a side chain amino group to form a staple through the 4-carboxyl group
  SITE 15: note = C-term amino
XDXXDXSAFKXXXEA

SEQ ID NO: 336 - protein, 15 aa, synthetic construct
  SITE 1: note = N-term Acetic Acid
  SITE 1: note = (R)-2-allylpyrrolidine-2-carboxylic acid, useful for stapling/stapled with another amino acid residue comprising an olefin group to form a staple through the olefin group
  SITE 3: note = (S)-2-amino-4,4-dimethylpentanoic acid
  VARIANT 4: note = 2-amino-2-(pent-4-en-1-yl)hept-6-enoic acid, useful for stapling/stapled with another amino acid residue comprising an olefin group to form a staple through one of the two olefin groups and/or with another amino acid residue comprising an olefin group to form a staple through the other of the two olefin groups
  SITE 6: note = (S)-3-(2-amino-2-carboxyethyl)benzoic acid
  SITE 10: note = L-lysine, useful for stapling/stapled with another amino acid residue comprising a side chain acid group to form a staple through the 6-amino group
  SITE 11: note (S)-3-amino-1-((pent-4-en-1-yloxy)carbonyl)pyrrolidine-3-ca rboxylic acid, useful for stapling/stapled with another amino acid residue comprising an olefin group to form a staple through the olefin group
  SITE 12: note = (S)-2-amino-3-(thiophen-3-yl)propanoic acid
  SITE 13: note = (S)-2-amino-3-(benzo[b]thiophen-3-yl)propanoic acid
  SITE 14: note = L-glutamic acid, useful for stapling/stapled with another amino acid residue comprising a side chain amino group to form a staple through the 4-carboxyl group
  SITE 15: note = C-term amino
XDXXDXQAFKXXXEA

SEQ ID NO: 337 - protein, 15 aa, synthetic construct
  SITE 1: note = N-term Acetic Acid
  SITE 1: note = (R)-2-allylpyrrolidine-2-carboxylic acid, useful for stapling/stapled with another amino acid residue comprising an olefin group to form a staple through the olefin group
  SITE 3: note = (S)-2-amino-4,4-dimethylpentanoic acid
  VARIANT 4: note = 2-amino-2-(pent-4-en-1-yl)hept-6-enoic acid, useful for stapling/stapled with another amino acid residue comprising an olefin group to form a staple through one of the two olefin groups and/or with another amino acid residue comprising an olefin group to form a staple through the other of the two olefin groups
  SITE 6: note = (S)-3-(2-amino-2-carboxyethyl)benzoic acid
  SITE 10: note = L-lysine, useful for stapling/stapled with another amino acid residue comprising a side chain acid group to form a staple through the 6-amino group
  SITE 11: note (S)-3-amino-1-((pent-4-en-1-yloxy)carbonyl)pyrrolidine-3-ca rboxylic acid, useful for stapling/stapled with another amino acid residue comprising an olefin group to form a staple through the olefin group
  SITE 12: note = (S)-2-amino-3-(thiophen-3-yl)propanoic acid
  SITE 13: note = (S)-2-amino-3-(benzo[b]thiophen-3-yl)propanoic acid
  SITE 14: note = L-glutamic acid, useful for stapling/stapled with another amino acid residue comprising a side chain amino group to form a staple through the 4-carboxyl group
  SITE 15: note = C-term amino
XDXXDXNAFKXXXEA

SEQ ID NO: 338 - protein, 15 aa, synthetic construct
  SITE 1: note = N-term Acetic Acid
  SITE 1: note = (R)-2-allylpyrrolidine-2-carboxylic acid, useful for stapling/stapled with another amino acid residue comprising an olefin group to form a staple through the olefin group
  SITE 3: note = (S)-2-amino-4,4-dimethylpentanoic acid
  VARIANT 4: note = 2-amino-2-(pent-4-en-1-yl)hept-6-enoic acid, useful for stapling/stapled with another amino acid residue comprising an olefin group to form a staple through one of the two olefin groups and/or with another amino acid residue comprising an olefin group to form a staple through the other of the two olefin groups
  SITE 6: note = (S)-3-(2-amino-2-carboxyethyl)benzoic acid
  SITE 7: note = 2-amino-2-methylpropanoic acid
  SITE 9: note = (S)-2-amino-2-cyclopropylacetic acid
  SITE 10: note = L-lysine, useful for stapling/stapled with another amino acid residue comprising a side chain acid group to form a staple through the 6-amino group
  SITE 11: note (S)-3-amino-1-((pent-4-en-1-yloxy)carbonyl)pyrrolidine-3-ca rboxylic acid, useful for stapling/stapled with another amino acid residue comprising an olefin group to form a staple through the olefin group
  SITE 12: note = (S)-2-amino-3-(thiophen-3-yl)propanoic acid
  SITE 13: note = (S)-2-amino-3-(benzo[b]thiophen-3-yl)propanoic acid
  SITE 14: note = L-glutamic acid, useful for stapling/stapled with another amino acid residue comprising a side chain amino group to form a staple through the 4-carboxyl group
  SITE 15: note = C-term amino
XDXXDXXAXKXXXEA

SEQ ID NO: 339 - protein, 15 aa, synthetic construct
  SITE 1: note = N-term Acetic Acid
  SITE 1: note = (R)-2-allylpyrrolidine-2-carboxylic acid, useful for stapling/stapled with another amino acid residue comprising an olefin group to form a staple through the olefin group
  SITE 3: note = (S)-2-amino-4,4-dimethylpentanoic acid
  VARIANT 4: note = 2-amino-2-(pent-4-en-1-yl)hept-6-enoic acid, useful for stapling/stapled with another amino acid residue comprising an olefin group to form a staple through one of the two olefin groups and/or with another amino acid residue comprising an olefin group to form a staple through the other of the two olefin groups
  SITE 6: note = (S)-3-(2-amino-2-carboxyethyl)benzoic acid
  SITE 7: note = 2-amino-2-methylpropanoic acid
  SITE 10: note = L-lysine, useful for stapling/stapled with another amino acid residue comprising a side chain acid group to form a staple through the 6-amino group
  SITE 11: note (S)-3-amino-1-((pent-4-en-1-yloxy)carbonyl)pyrrolidine-3-ca rboxylic acid, useful for stapling/stapled with another amino acid residue comprising an olefin group to form a staple through the olefin group
  SITE 12: note = (S)-2-amino-3-(thiophen-3-yl)propanoic acid
  SITE 13: note = (S)-2-amino-3-(benzo[b]thiophen-3-yl)propanoic acid
  SITE 14: note = L-glutamic acid, useful for stapling/stapled with another amino acid residue comprising a side chain amino group to form a staple through the 4-carboxyl group
  SITE 15: note = C-term amino
XDXXDXXAFKXXXEV

SEQ ID NO: 340 - protein, 15 aa, synthetic construct
  SITE 1: note = N-term Acetic Acid
  SITE 1: note = (R)-2-allylpyrrolidine-2-carboxylic acid, useful for stapling/stapled with another amino acid residue comprising an olefin group to form a staple through the olefin group
  SITE 3: note = (S)-2-amino-4,4-dimethylpentanoic acid
  VARIANT 4: note = 2-amino-2-(pent-4-en-1-yl)hept-6-enoic acid, useful for stapling/stapled with another amino acid residue comprising an olefin group to form a staple through one of the two olefin groups and/or with another amino acid residue comprising an olefin group to form a staple through the other of the two olefin groups
  SITE 6: note = (S)-3-(2-amino-2-carboxyethyl)benzoic acid
  SITE 7: note = 2-amino-2-methylpropanoic acid
  SITE 10: note = L-lysine, useful for stapling/stapled with another amino acid residue comprising a side chain acid group to form a staple through the 6-amino group
  SITE 11: note (S)-3-amino-1-((pent-4-en-1-yloxy)carbonyl)pyrrolidine-3-ca rboxylic acid, useful for stapling/stapled with another amino acid residue comprising an olefin group to form a staple through the olefin group
  SITE 12: note = (S)-2-amino-3-(thiophen-3-yl)propanoic acid
  SITE 13: note = (S)-2-amino-3-(benzo[b]thiophen-3-yl)propanoic acid
  SITE 14: note = L-glutamic acid, useful for stapling/stapled with another amino acid residue comprising a side chain amino group to form a staple through the 4-carboxyl group
  SITE 15: note = 2-amino-2-methylpropanoic acid
  SITE 15: note = C-term amino
XDXXDXXAFKXXXEX

SEQ ID NO: 341 - protein, 15 aa, synthetic construct
  SITE 1: note = N-term Acetic Acid
  SITE 1: note = (R)-2-allylpyrrolidine-2-carboxylic acid, useful for stapling/stapled with another amino acid residue comprising an olefin group to form a staple through the olefin group
  SITE 3: note = (S)-2-amino-4,4-dimethylpentanoic acid
  VARIANT 4: note = 2-amino-2-(pent-4-en-1-yl)hept-6-enoic acid, useful for stapling/stapled with another amino acid residue comprising an olefin group to form a staple through one of the two olefin groups and/or with another amino acid residue comprising an olefin group to form a staple through the other of the two olefin groups
  SITE 6: note = (S)-3-(2-amino-2-carboxyethyl)benzoic acid
  SITE 7: note = 2-amino-2-methylpropanoic acid
  SITE 10: note = L-lysine, useful for stapling/stapled with another amino acid residue comprising a side chain acid group to form a staple through the 6-amino group
  SITE 11: note (S)-3-amino-1-((pent-4-en-1-yloxy)carbonyl)pyrrolidine-3-ca rboxylic acid, useful for stapling/stapled with another amino acid residue comprising an olefin group to form a staple through the olefin group
  SITE 12: note = (S)-2-amino-3-(thiophen-3-yl)propanoic acid
  SITE 13: note = (S)-2-amino-3-(benzo[b]thiophen-3-yl)propanoic acid
  SITE 14: note = L-glutamic acid, useful for stapling/stapled with another amino acid residue comprising a side chain amino group to form a staple through the 4-carboxyl group
  SITE 15: note = C-term amino
XDXXDXXAFKXXXET

SEQ ID NO: 342 - protein, 16 aa, synthetic construct
  SITE 1: note = N-term Acetic Acid
  SITE 1: note = (R)-2-allylpyrrolidine-2-carboxylic acid, useful for stapling/stapled with another amino acid residue comprising an olefin group to form a staple through the olefin group
  SITE 3: note = (S)-2-amino-4,4-dimethylpentanoic acid
  VARIANT 4: note = 2-amino-2-(pent-4-en-1-yl)hept-6-enoic acid, useful for stapling/stapled with another amino acid residue comprising an olefin group to form a staple through one of the two olefin groups and/or with another amino acid residue comprising an olefin group to form a staple through the other of the two olefin groups
  SITE 6: note = (S)-3-(2-amino-2-carboxyethyl)benzoic acid
  SITE 7: note = 2-amino-2-methylpropanoic acid
  SITE 10: note = L-lysine, useful for stapling/stapled with another amino acid residue comprising a side chain acid group to form a staple through the 6-amino group
  SITE 11: note (S)-3-amino-1-((pent-4-en-1-yloxy)carbonyl)pyrrolidine-3-ca rboxylic acid, useful for stapling/stapled with another amino acid residue comprising an olefin group to form a staple through the olefin group
  SITE 12: note = (S)-2-amino-3-(thiophen-3-yl)propanoic acid
  SITE 13: note = (S)-2-amino-3-(benzo[b]thiophen-3-yl)propanoic acid
  SITE 14: note = L-glutamic acid, useful for stapling/stapled with another amino acid residue comprising a side chain amino group to form a staple through the 4-carboxyl group
  SITE 16: note = C-term amino
XDXXDXXAFKXXXEVS

SEQ ID NO: 343 - protein, 16 aa, synthetic construct
  SITE 1: note = N-term Acetic Acid
  SITE 1: note = (R)-2-allylpyrrolidine-2-carboxylic acid, useful for stapling/stapled with another amino acid residue comprising an olefin group to form a staple through the olefin group
  SITE 3: note = (S)-2-amino-4,4-dimethylpentanoic acid
  VARIANT 4: note = 2-amino-2-(pent-4-en-1-yl)hept-6-enoic acid, useful for stapling/stapled with another amino acid residue comprising an olefin group to form a staple through one of the two olefin groups and/or with another amino acid residue comprising an olefin group to form a staple through the other of the two olefin groups
  SITE 6: note = (S)-3-(2-amino-2-carboxyethyl)benzoic acid
  SITE 7: note = 2-amino-2-methylpropanoic acid
  SITE 10: note = L-lysine, useful for stapling/stapled with another amino acid residue comprising a side chain acid group to form a staple through the 6-amino group
  SITE 11: note (S)-3-amino-1-((pent-4-en-1-yloxy)carbonyl)pyrrolidine-3-ca rboxylic acid, useful for stapling/stapled with another amino acid residue comprising an olefin group to form a staple through the olefin group
  SITE 12: note = (S)-2-amino-3-(thiophen-3-yl)propanoic acid
  SITE 13: note = (S)-2-amino-3-(benzo[b]thiophen-3-yl)propanoic acid
  SITE 14: note = L-glutamic acid, useful for stapling/stapled with another amino acid residue comprising a side chain amino group to form a staple through the 4-carboxyl group
  SITE 15: note = 2-amino-2-methylpropanoic acid
  SITE 16: note = C-term amino
XDXXDXXAFKXXXEXS

SEQ ID NO: 344 - protein, 16 aa, synthetic construct
  SITE 1: note = N-term Acetic Acid
  SITE 1: note = (R)-2-allylpyrrolidine-2-carboxylic acid, useful for stapling/stapled with another amino acid residue comprising an olefin group to form a staple through the olefin group
  SITE 3: note = (S)-2-amino-4,4-dimethylpentanoic acid
  VARIANT 4: note = 2-amino-2-(pent-4-en-1-yl)hept-6-enoic acid, useful for stapling/stapled with another amino acid residue comprising an olefin group to form a staple through one of the two olefin groups and/or with another amino acid residue comprising an olefin group to form a staple through the other of the two olefin groups
  SITE 6: note = (S)-3-(2-amino-2-carboxyethyl)benzoic acid
  SITE 7: note = 2-amino-2-methylpropanoic acid
  SITE 10: note = L-lysine, useful for stapling/stapled with another amino acid residue comprising a side chain acid group to form a staple through the 6-amino group
  SITE 11: note (S)-3-amino-1-((pent-4-en-1-yloxy)carbonyl)pyrrolidine-3-ca rboxylic acid, useful for stapling/stapled with another amino acid residue comprising an olefin group to form a staple through the olefin group
  SITE 12: note = (S)-2-amino-3-(thiophen-3-yl)propanoic acid
  SITE 13: note = (S)-2-amino-3-(benzo[b]thiophen-3-yl)propanoic acid
  SITE 14: note = L-glutamic acid, useful for stapling/stapled with another amino acid residue comprising a side chain amino group to form a staple through the 4-carboxyl group
  SITE 16: note = C-term amino
XDXXDXXAFKXXXETS

SEQ ID NO: 345 - protein, 16 aa, synthetic construct
  SITE 1: note = N-term Acetic Acid
  SITE 1: note = (R)-2-allylpyrrolidine-2-carboxylic acid, useful for stapling/stapled with another amino acid residue comprising an olefin group to form a staple through the olefin group
  SITE 3: note = (S)-2-amino-4,4-dimethylpentanoic acid
  VARIANT 4: note = 2-amino-2-(pent-4-en-1-yl)hept-6-enoic acid, useful for stapling/stapled with another amino acid residue comprising an olefin group to form a staple through one of the two olefin groups and/or with another amino acid residue comprising an olefin group to form a staple through the other of the two olefin groups
  SITE 6: note = (S)-3-(2-amino-2-carboxyethyl)benzoic acid
  SITE 7: note = 2-amino-2-methylpropanoic acid
  SITE 10: note = L-lysine, useful for stapling/stapled with another amino acid residue comprising a side chain acid group to form a staple through the 6-amino group
  SITE 11: note (S)-3-amino-1-((pent-4-en-1-yloxy)carbonyl)pyrrolidine-3-ca rboxylic acid, useful for stapling/stapled with another amino acid residue comprising an olefin group to form a staple through the olefin group
  SITE 12: note = (S)-2-amino-3-(thiophen-3-yl)propanoic acid
  SITE 13: note = (S)-2-amino-3-(benzo[b]thiophen-3-yl)propanoic acid
  SITE 14: note = L-glutamic acid, useful for stapling/stapled with another amino acid residue comprising a side chain amino group to form a staple through the 4-carboxyl group
  SITE 16: note = C-term amino
XDXXDXXAFKXXXEVA

SEQ ID NO: 346 - protein, 16 aa, synthetic construct
  SITE 1: note = N-term Acetic Acid
  SITE 1: note = (R)-2-allylpyrrolidine-2-carboxylic acid, useful for stapling/stapled with another amino acid residue comprising an olefin group to form a staple through the olefin group
  SITE 3: note = (S)-2-amino-4,4-dimethylpentanoic acid
  VARIANT 4: note = 2-amino-2-(pent-4-en-1-yl)hept-6-enoic acid, useful for stapling/stapled with another amino acid residue comprising an olefin group to form a staple through one of the two olefin groups and/or with another amino acid residue comprising an olefin group to form a staple through the other of the two olefin groups
  SITE 6: note = (S)-3-(2-amino-2-carboxyethyl)benzoic acid
  SITE 7: note = 2-amino-2-methylpropanoic acid
  SITE 10: note = L-lysine, useful for stapling/stapled with another amino acid residue comprising a side chain acid group to form a staple through the 6-amino group
  SITE 11: note (S)-3-amino-1-((pent-4-en-1-yloxy)carbonyl)pyrrolidine-3-ca rboxylic acid, useful for stapling/stapled with another amino acid residue comprising an olefin group to form a staple through the olefin group
  SITE 12: note = (S)-2-amino-3-(thiophen-3-yl)propanoic acid
  SITE 13: note = (S)-2-amino-3-(benzo[b]thiophen-3-yl)propanoic acid
  SITE 14: note = L-glutamic acid, useful for stapling/stapled with another amino acid residue comprising a side chain amino group to form a staple through the 4-carboxyl group
  SITE 15: note = 2-amino-2-methylpropanoic acid
  SITE 16: note = C-term amino
XDXXDXXAFKXXXEXA

SEQ ID NO: 347 - protein, 16 aa, synthetic construct
  SITE 1: note = N-term Acetic Acid
  SITE 1: note = (R)-2-allylpyrrolidine-2-carboxylic acid, useful for stapling/stapled with another amino acid residue comprising an olefin group to form a staple through the olefin group
  SITE 3: note = (S)-2-amino-4,4-dimethylpentanoic acid
  VARIANT 4: note = 2-amino-2-(pent-4-en-1-yl)hept-6-enoic acid, useful for stapling/stapled with another amino acid residue comprising an olefin group to form a staple through one of the two olefin groups and/or with another amino acid residue comprising an olefin group to form a staple through the other of the two olefin groups
  SITE 6: note = (S)-3-(2-amino-2-carboxyethyl)benzoic acid
  SITE 7: note = 2-amino-2-methylpropanoic acid
  SITE 10: note = L-lysine, useful for stapling/stapled with another amino acid residue comprising a side chain acid group to form a staple through the 6-amino group
  SITE 11: note (S)-3-amino-1-((pent-4-en-1-yloxy)carbonyl)pyrrolidine-3-ca rboxylic acid, useful for stapling/stapled with another amino acid residue comprising an olefin group to form a staple through the olefin group
  SITE 12: note = (S)-2-amino-3-(thiophen-3-yl)propanoic acid
  SITE 13: note = (S)-2-amino-3-(benzo[b]thiophen-3-yl)propanoic acid
  SITE 14: note = L-glutamic acid, useful for stapling/stapled with another amino acid residue comprising a side chain amino group to form a staple through the 4-carboxyl group
  SITE 16: note = C-term amino
XDXXDXXAFKXXXETA

SEQ ID NO: 348 - protein, 16 aa, synthetic construct
  SITE 1: note = N-term Acetic Acid
  SITE 1: note = (R)-2-allylpyrrolidine-2-carboxylic acid, useful for stapling/stapled with another amino acid residue comprising an olefin group to form a staple through the olefin group
  SITE 3: note = (S)-2-amino-4,4-dimethylpentanoic acid
  VARIANT 4: note = 2-amino-2-(pent-4-en-1-yl)hept-6-enoic acid, useful for stapling/stapled with another amino acid residue comprising an olefin group to form a staple through one of the two olefin groups and/or with another amino acid residue comprising an olefin group to form a staple through the other of the two olefin groups
  SITE 6: note = (S)-3-(2-amino-2-carboxyethyl)benzoic acid
  SITE 7: note = 2-amino-2-methylpropanoic acid
  SITE 10: note = L-lysine, useful for stapling/stapled with another amino acid residue comprising a side chain acid group to form a staple through the 6-amino group
  SITE 11: note (S)-3-amino-1-((pent-4-en-1-yloxy)carbonyl)pyrrolidine-3-ca rboxylic acid, useful for stapling/stapled with another amino acid residue comprising an olefin group to form a staple through the olefin group
  SITE 12: note = (S)-2-amino-3-(thiophen-3-yl)propanoic acid
  SITE 13: note = (S)-2-amino-3-(benzo[b]thiophen-3-yl)propanoic acid
  SITE 14: note = L-glutamic acid, useful for stapling/stapled with another amino acid residue comprising a side chain amino group to form a staple through the 4-carboxyl group
  SITE 16: note = 2-amino-2-methylpropanoic acid
  SITE 16: note = C-term amino
XDXXDXXAFKXXXEVX

SEQ ID NO: 349 - protein, 16 aa, synthetic construct
  SITE 1: note = N-term Acetic Acid
  SITE 1: note = (R)-2-allylpyrrolidine-2-carboxylic acid, useful for stapling/stapled with another amino acid residue comprising an olefin group to form a staple through the olefin group
  SITE 3: note = (S)-2-amino-4,4-dimethylpentanoic acid
  VARIANT 4: note = 2-amino-2-(pent-4-en-1-yl)hept-6-enoic acid, useful for stapling/stapled with another amino acid residue comprising an olefin group to form a staple through one of the two olefin groups and/or with another amino acid residue comprising an olefin group to form a staple through the other of the two olefin groups
  SITE 6: note = (S)-3-(2-amino-2-carboxyethyl)benzoic acid
  SITE 7: note = 2-amino-2-methylpropanoic acid
  SITE 10: note = L-lysine, useful for stapling/stapled with another amino acid residue comprising a side chain acid group to form a staple through the 6-amino group
  SITE 11: note (S)-3-amino-1-((pent-4-en-1-yloxy)carbonyl)pyrrolidine-3-ca rboxylic acid, useful for stapling/stapled with another amino acid residue comprising an olefin group to form a staple through the olefin group
  SITE 12: note = (S)-2-amino-3-(thiophen-3-yl)propanoic acid
  SITE 13: note = (S)-2-amino-3-(benzo[b]thiophen-3-yl)propanoic acid
  SITE 14: note = L-glutamic acid, useful for stapling/stapled with another amino acid residue comprising a side chain amino group to form a staple through the 4-carboxyl group
  SITE 15: note = 2-amino-2-methylpropanoic acid
  SITE 16: note = 2-amino-2-methylpropanoic acid
  SITE 16: note = C-term amino
XDXXDXXAFKXXXEXX

SEQ ID NO: 350 - protein, 16 aa, synthetic construct
  SITE 1: note = N-term Acetic Acid
  SITE 1: note = (R)-2-allylpyrrolidine-2-carboxylic acid, useful for stapling/stapled with another amino acid residue comprising an olefin group to form a staple through the olefin group
  SITE 3: note = (S)-2-amino-4,4-dimethylpentanoic acid
  VARIANT 4: note = 2-amino-2-(pent-4-en-1-yl)hept-6-enoic acid, useful for stapling/stapled with another amino acid residue comprising an olefin group to form a staple through one of the two olefin groups and/or with another amino acid residue comprising an olefin group to form a staple through the other of the two olefin groups
  SITE 6: note = (S)-3-(2-amino-2-carboxyethyl)benzoic acid
  SITE 7: note = 2-amino-2-methylpropanoic acid
  SITE 10: note = L-lysine, useful for stapling/stapled with another amino acid residue comprising a side chain acid group to form a staple through the 6-amino group
  SITE 11: note (S)-3-amino-1-((pent-4-en-1-yloxy)carbonyl)pyrrolidine-3-ca rboxylic acid, useful for stapling/stapled with another amino acid residue comprising an olefin group to form a staple through the olefin group
  SITE 12: note = (S)-2-amino-3-(thiophen-3-yl)propanoic acid
  SITE 13: note = (S)-2-amino-3-(benzo[b]thiophen-3-yl)propanoic acid
  SITE 14: note = L-glutamic acid, useful for stapling/stapled with another amino acid residue comprising a side chain amino group to form a staple through the 4-carboxyl group
  SITE 16: note = 2-amino-2-methylpropanoic acid
  SITE 16: note = C-term amino
XDXXDXXAFKXXXETX

SEQ ID NO: 351 - protein, 15 aa, synthetic construct
  SITE 1: note = N-term Acetic Acid
  SITE 1: note = (R)-2-allylpyrrolidine-2-carboxylic acid, useful for stapling/stapled with another amino acid residue comprising an olefin group to form a staple through the olefin group
  SITE 3: note = (S)-2-amino-4,4-dimethylpentanoic acid
  VARIANT 4: note = 2-amino-2-(pent-4-en-1-yl)hept-6-enoic acid, useful for stapling/stapled with another amino acid residue comprising an olefin group to form a staple through one of the two olefin groups and/or with another amino acid residue comprising an olefin group to form a staple through the other of the two olefin groups
  SITE 6: note = (S)-3-(2-amino-2-carboxyethyl)benzoic acid
  SITE 7: note = 2-amino-2-methylpropanoic acid
  SITE 10: note = (S)-2-amino-6-(1H-1,2,3-triazol-1-yl)hexanoic acid, useful for stapling/stapled with another amino acid residue to form a staple through the 4-position of the triazolyl group
  SITE 11: note (S)-3-amino-1-((pent-4-en-1-yloxy)carbonyl)pyrrolidine-3-ca rboxylic acid, useful for stapling/stapled with another amino acid residue comprising an olefin group to form a staple through the olefin group
  SITE 12: note = (S)-2-amino-3-(thiophen-3-yl)propanoic acid
  SITE 13: note = (S)-2-amino-3-(benzo[b]thiophen-3-yl)propanoic acid
  SITE 14: note = L-alanine, useful for stapling/stapled with another amino acid residue comprising a triazolyl group to form a staple through the terminal methyl group
  SITE 15: note = C-term amino
XDXXDXXAFXXXXAV

SEQ ID NO: 352 - protein, 15 aa, synthetic construct
  SITE 1: note = N-term Acetic Acid
  SITE 1: note = (R)-2-allylpyrrolidine-2-carboxylic acid, useful for stapling/stapled with another amino acid residue comprising an olefin group to form a staple through the olefin group
  SITE 3: note = (S)-2-amino-4,4-dimethylpentanoic acid
  VARIANT 4: note = 2-amino-2-(pent-4-en-1-yl)hept-6-enoic acid, useful for stapling/stapled with another amino acid residue comprising an olefin group to form a staple through one of the two olefin groups and/or with another amino acid residue comprising an olefin group to form a staple through the other of the two olefin groups
  SITE 6: note = (S)-3-(2-amino-2-carboxyethyl)benzoic acid
  SITE 7: note = 2-amino-2-methylpropanoic acid
  SITE 10: note = (S)-2-amino-6-(1H-1,2,3-triazol-1-yl)hexanoic acid, useful for stapling/stapled with another amino acid residue to form a staple through the 4-position of the triazolyl group
  SITE 11: note (S)-3-amino-1-((pent-4-en-1-yloxy)carbonyl)pyrrolidine-3-ca rboxylic acid, useful for stapling/stapled with another amino acid residue comprising an olefin group to form a staple through the olefin group
  SITE 12: note = (S)-2-amino-3-(thiophen-3-yl)propanoic acid
  SITE 13: note = (S)-2-amino-3-(benzo[b]thiophen-3-yl)propanoic acid
  SITE 14: note = L-alanine, useful for stapling/stapled with another amino acid residue comprising a triazolyl group to form a staple through the terminal methyl group
  SITE 15: note = C-term amino
XDXXDXXAFXXXXAL

SEQ ID NO: 353 - protein, 15 aa, synthetic construct
  SITE 1: note = N-term Acetic Acid
  SITE 1: note = (R)-2-allylpyrrolidine-2-carboxylic acid, useful for stapling/stapled with another amino acid residue comprising an olefin group to form a staple through the olefin group
  SITE 3: note = (S)-2-amino-4,4-dimethylpentanoic acid
  VARIANT 4: note = 2-amino-2-(pent-4-en-1-yl)hept-6-enoic acid, useful for stapling/stapled with another amino acid residue comprising an olefin group to form a staple through one of the two olefin groups and/or with another amino acid residue comprising an olefin group to form a staple through the other of the two olefin groups
  SITE 6: note = (S)-3-(2-amino-2-carboxyethyl)benzoic acid
  SITE 7: note = 2-amino-2-methylpropanoic acid
  SITE 10: note = (S)-2-amino-6-(1H-1,2,3-triazol-1-yl)hexanoic acid, useful for stapling/stapled with another amino acid residue to form a staple through the 4-position of the triazolyl group
  SITE 11: note (S)-3-amino-1-((pent-4-en-1-yloxy)carbonyl)pyrrolidine-3-ca rboxylic acid, useful for stapling/stapled with another amino acid residue comprising an olefin group to form a staple through the olefin group
  SITE 12: note = (S)-2-amino-3-(thiophen-3-yl)propanoic acid
  SITE 13: note = (S)-2-amino-3-(benzo[b]thiophen-3-yl)propanoic acid
  SITE 14: note = L-alanine, useful for stapling/stapled with another amino acid residue comprising a triazolyl group to form a staple through the terminal methyl group
  SITE 15: note = C-term amino
XDXXDXXAFXXXXAT

SEQ ID NO: 354 - protein, 16 aa, synthetic construct
  SITE 1: note = N-term Acetic Acid
  SITE 1: note = (R)-2-allylpyrrolidine-2-carboxylic acid, useful for stapling/stapled with another amino acid residue comprising an olefin group to form a staple through the olefin group
  SITE 3: note = (S)-2-amino-4,4-dimethylpentanoic acid
  VARIANT 4: note = 2-amino-2-(pent-4-en-1-yl)hept-6-enoic acid, useful for stapling/stapled with another amino acid residue comprising an olefin group to form a staple through one of the two olefin groups and/or with another amino acid residue comprising an olefin group to form a staple through the other of the two olefin groups
  SITE 6: note = (S)-3-(2-amino-2-carboxyethyl)benzoic acid
  SITE 7: note = 2-amino-2-methylpropanoic acid
  SITE 10: note = (S)-2-amino-6-(1H-1,2,3-triazol-1-yl)hexanoic acid, useful for stapling/stapled with another amino acid residue to form a staple through the 4-position of the triazolyl group
  SITE 11: note (S)-3-amino-1-((pent-4-en-1-yloxy)carbonyl)pyrrolidine-3-ca rboxylic acid, useful for stapling/stapled with another amino acid residue comprising an olefin group to form a staple through the olefin group
  SITE 12: note = (S)-2-amino-3-(thiophen-3-yl)propanoic acid
  SITE 13: note = (S)-2-amino-3-(benzo[b]thiophen-3-yl)propanoic acid
  SITE 14: note = L-alanine, useful for stapling/stapled with another amino acid residue comprising a triazolyl group to form a staple through the terminal methyl group
  SITE 16: note = C-term amino
XDXXDXXAFXXXXAAS

SEQ ID NO: 355 - protein, 16 aa, synthetic construct
  SITE 1: note = N-term Acetic Acid
  SITE 1: note = (R)-2-allylpyrrolidine-2-carboxylic acid, useful for stapling/stapled with another amino acid residue comprising an olefin group to form a staple through the olefin group
  SITE 3: note = (S)-2-amino-4,4-dimethylpentanoic acid
  VARIANT 4: note = 2-amino-2-(pent-4-en-1-yl)hept-6-enoic acid, useful for stapling/stapled with another amino acid residue comprising an olefin group to form a staple through one of the two olefin groups and/or with another amino acid residue comprising an olefin group to form a staple through the other of the two olefin groups
  SITE 6: note = (S)-3-(2-amino-2-carboxyethyl)benzoic acid
  SITE 7: note = 2-amino-2-methylpropanoic acid
  SITE 10: note = (S)-2-amino-6-(1H-1,2,3-triazol-1-yl)hexanoic acid, useful for stapling/stapled with another amino acid residue to form a staple through the 4-position of the triazolyl group
  SITE 11: note (S)-3-amino-1-((pent-4-en-1-yloxy)carbonyl)pyrrolidine-3-ca rboxylic acid, useful for stapling/stapled with another amino acid residue comprising an olefin group to form a staple through the olefin group
  SITE 12: note = (S)-2-amino-3-(thiophen-3-yl)propanoic acid
  SITE 13: note = (S)-2-amino-3-(benzo[b]thiophen-3-yl)propanoic acid
  SITE 14: note = L-alanine, useful for stapling/stapled with another amino acid residue comprising a triazolyl group to form a staple through the terminal methyl group
  SITE 16: note = C-term amino
XDXXDXXAFXXXXAVS

SEQ ID NO: 356 - protein, 15 aa, synthetic construct
  SITE 1: note = N-term Acetic Acid
  SITE 1: note = (R)-2-allylpyrrolidine-2-carboxylic acid, useful for stapling/stapled with another amino acid residue comprising an olefin group to form a staple through the olefin group
  SITE 3: note = (S)-2-amino-4,4-dimethylpentanoic acid
  VARIANT 4: note = 2-amino-2-(pent-4-en-1-yl)hept-6-enoic acid, useful for stapling/stapled with another amino acid residue comprising an olefin group to form a staple through one of the two olefin groups and/or with another amino acid residue comprising an olefin group to form a staple through the other of the two olefin groups
  SITE 6: note = (S)-3-(2-amino-2-carboxyethyl)benzoic acid
  SITE 7: note = 2-amino-2-methylpropanoic acid
  SITE 10: note = (S)-2-amino-6-(1H-1,2,3-triazol-1-yl)hexanoic acid, useful for stapling/stapled with another amino acid residue to form a staple through the 4-position of the triazolyl group
  SITE 11: note (S)-3-amino-1-((pent-4-en-1-yloxy)carbonyl)pyrrolidine-3-ca rboxylic acid, useful for stapling/stapled with another amino acid residue comprising an olefin group to form a staple through the olefin group
  SITE 13: note = (S)-2-amino-3-(benzo[b]thiophen-3-yl)propanoic acid
  SITE 14: note = L-alanine, useful for stapling/stapled with another amino acid residue comprising a triazolyl group to form a staple through the terminal methyl group
  SITE 15: note = C-term amino
XDXXDXXAFXXFXAA

SEQ ID NO: 357 - protein, 15 aa, synthetic construct
  SITE 1: note = N-term Acetic Acid
  SITE 1: note = (R)-2-allylpyrrolidine-2-carboxylic acid, useful for stapling/stapled with another amino acid residue comprising an olefin group to form a staple through the olefin group
  SITE 3: note = (S)-2-amino-4,4-dimethylpentanoic acid
  VARIANT 4: note = 2-amino-2-(pent-4-en-1-yl)hept-6-enoic acid, useful for stapling/stapled with another amino acid residue comprising an olefin group to form a staple through one of the two olefin groups and/or with another amino acid residue comprising an olefin group to form a staple through the other of the two olefin groups
  SITE 6: note = (S)-3-(2-amino-2-carboxyethyl)benzoic acid
  SITE 7: note = 2-amino-2-methylpropanoic acid
  SITE 10: note = (S)-2-amino-6-(1H-1,2,3-triazol-1-yl)hexanoic acid, useful for stapling/stapled with another amino acid residue to form a staple through the 4-position of the triazolyl group
  SITE 11: note (S)-3-amino-1-((pent-4-en-1-yloxy)carbonyl)pyrrolidine-3-ca rboxylic acid, useful for stapling/stapled with another amino acid residue comprising an olefin group to form a staple through the olefin group
  SITE 13: note = (S)-2-amino-3-(benzo[b]thiophen-3-yl)propanoic acid
  SITE 14: note = (S)-2-aminobutanoic acid, useful for stapling/stapled with another amino acid residue comprising a triazolyl group to form a staple through the terminal methyl group
  SITE 15: note = C-term amino
XDXXDXXAFXXFXXA

SEQ ID NO: 358 - protein, 15 aa, synthetic construct
  SITE 1: note = N-term Acetic Acid
  SITE 1: note = (R)-2-allylpyrrolidine-2-carboxylic acid, useful for stapling/stapled with another amino acid residue comprising an olefin group to form a staple through the olefin group
  SITE 3: note = (S)-2-amino-4,4-dimethylpentanoic acid
  VARIANT 4: note = 2-amino-2-(pent-4-en-1-yl)hept-6-enoic acid, useful for stapling/stapled with another amino acid residue comprising an olefin group to form a staple through one of the two olefin groups and/or with another amino acid residue comprising an olefin group to form a staple through the other of the two olefin groups
  SITE 6: note = (S)-3-(2-amino-2-carboxyethyl)benzoic acid
  SITE 7: note = 2-amino-2-methylpropanoic acid
  SITE 10: note = (S)-2-amino-5-(1H-1,2,3-triazol-1-yl)pentanoic acid, useful for stapling/stapled with another amino acid residue to form a staple through the 4-position of the triazolyl group
  SITE 11: note (S)-3-amino-1-((pent-4-en-1-yloxy)carbonyl)pyrrolidine-3-ca rboxylic acid, useful for stapling/stapled with another amino acid residue comprising an olefin group to form a staple through the olefin group
  SITE 12: note = (S)-2-amino-3-(thiophen-3-yl)propanoic acid
  SITE 13: note = (S)-2-amino-3-(benzo[b]thiophen-3-yl)propanoic acid
  SITE 14: note = L-alanine, useful for stapling/stapled with another amino acid residue comprising a triazolyl group to form a staple through the terminal methyl group
  SITE 15: note = C-term amino
XDXXDXXAFXXXXAA

SEQ ID NO: 359 - protein, 15 aa, synthetic construct
  SITE 1: note = N-term Acetic Acid
  SITE 1: note = (R)-2-allylpyrrolidine-2-carboxylic acid, useful for stapling/stapled with another amino acid residue comprising an olefin group to form a staple through the olefin group
  SITE 3: note = (S)-2-amino-4,4-dimethylpentanoic acid
  VARIANT 4: note = 2-amino-2-(pent-4-en-1-yl)hept-6-enoic acid, useful for stapling/stapled with another amino acid residue comprising an olefin group to form a staple through one of the two olefin groups and/or with another amino acid residue comprising an olefin group to form a staple through the other of the two olefin groups
  SITE 6: note = (S)-3-(2-amino-2-carboxyethyl)benzoic acid
  SITE 7: note = 2-amino-2-methylpropanoic acid
  SITE 10: note = (S)-2-amino-5-(1H-1,2,3-triazol-1-yl)pentanoic acid, useful for stapling/stapled with another amino acid residue to form a staple through the 4-position of the triazolyl group
  SITE 11: note (S)-3-amino-1-((pent-4-en-1-yloxy)carbonyl)pyrrolidine-3-ca rboxylic acid, useful for stapling/stapled with another amino acid residue comprising an olefin group to form a staple through the olefin group
  SITE 13: note = (S)-2-amino-3-(benzo[b]thiophen-3-yl)propanoic acid
  SITE 14: note = L-alanine, useful for stapling/stapled with another amino acid residue comprising a triazolyl group to form a staple through the terminal methyl group
  SITE 15: note = C-term amino
XDXXDXXAFXXFXAA

SEQ ID NO: 360 - protein, 15 aa, synthetic construct
  SITE 1: note = N-term Acetic Acid
  SITE 1: note = (R)-2-allylpyrrolidine-2-carboxylic acid, useful for stapling/stapled with another amino acid residue comprising an olefin group to form a staple through the olefin group
  SITE 3: note = (S)-2-amino-4,4-dimethylpentanoic acid
  VARIANT 4: note = 2-amino-2-(pent-4-en-1-yl)hept-6-enoic acid, useful for stapling/stapled with another amino acid residue comprising an olefin group to form a staple through one of the two olefin groups and/or with another amino acid residue comprising an olefin group to form a staple through the other of the two olefin groups
  SITE 6: note = (S)-3-(2-amino-2-carboxyethyl)benzoic acid
  SITE 7: note = 2-amino-2-methylpropanoic acid
  SITE 10: note = (S)-2-amino-5-(1H-1,2,3-triazol-1-yl)pentanoic acid, useful for stapling/stapled with another amino acid residue to form a staple through the 4-position of the triazolyl group
  SITE 11: note (S)-3-amino-1-((pent-4-en-1-yloxy)carbonyl)pyrrolidine-3-ca rboxylic acid, useful for stapling/stapled with another amino acid residue comprising an olefin group to form a staple through the olefin group
  SITE 12: note = (S)-2-amino-3-(thiophen-3-yl)propanoic acid
  SITE 13: note = (S)-2-amino-3-(benzo[b]thiophen-3-yl)propanoic acid
  SITE 14: note = (S)-2-aminobutanoic acid, useful for stapling/stapled with another amino acid residue comprising a triazolyl group to form a staple through the terminal methyl group
  SITE 15: note = C-term amino
XDXXDXXAFXXXXXA

SEQ ID NO: 361 - protein, 15 aa, synthetic construct
  SITE 1: note = N-term Acetic Acid
  SITE 1: note = (R)-2-allylpyrrolidine-2-carboxylic acid, useful for stapling/stapled with another amino acid residue comprising an olefin group to form a staple through the olefin group
  SITE 3: note = (S)-2-amino-4,4-dimethylpentanoic acid
  VARIANT 4: note = 2-amino-2-(pent-4-en-1-yl)hept-6-enoic acid, useful for stapling/stapled with another amino acid residue comprising an olefin group to form a staple through one of the two olefin groups and/or with another amino acid residue comprising an olefin group to form a staple through the other of the two olefin groups
  SITE 6: note = (S)-3-(2-amino-2-carboxyethyl)benzoic acid
  SITE 7: note = 2-amino-2-methylpropanoic acid
  SITE 10: note = (S)-2-amino-5-(1H-1,2,3-triazol-1-yl)pentanoic acid, useful for stapling/stapled with another amino acid residue to form a staple through the 4-position of the triazolyl group
  SITE 11: note (S)-3-amino-1-((pent-4-en-1-yloxy)carbonyl)pyrrolidine-3-ca rboxylic acid, useful for stapling/stapled with another amino acid residue comprising an olefin group to form a staple through the olefin group
  SITE 13: note = (S)-2-amino-3-(benzo[b]thiophen-3-yl)propanoic acid
  SITE 14: note = (S)-2-aminobutanoic acid, useful for stapling/stapled with another amino acid residue comprising a triazolyl group to form a staple through the terminal methyl group
  SITE 15: note = C-term amino
XDXXDXXAFXXFXXA

SEQ ID NO: 362 - protein, 15 aa, synthetic construct
  SITE 1: note = N-term pent-4-enoic acid, useful for stapling/stapled with another amino acid residue comprising an olefin group to form a staple through the olefin group
  SITE 1: note = (S)-2-methylpyrrolidine-2-carboxylic acid
  SITE 3: note = (S)-2-aminopent-4-enoic acid, useful for stapling/stapled with another amino acid residue comprising an olefin group to form a staple through the olefin group
  SITE 4: note = (R)-2-amino-2-methylhept-6-enoic acid, useful for stapling/stapled with another amino acid residue comprising an olefin group to form a staple through the olefin group
  SITE 6: note = (S)-3-(2-amino-2-carboxyethyl)benzoic acid
  SITE 7: note = 2-amino-2-methylpropanoic acid
  SITE 10: note = L-lysine, useful for stapling/stapled with another amino acid residue comprising a side chain acid group to form a staple through the 6-amino group
  SITE 11: note (S)-3-amino-1-((pent-4-en-1-yloxy)carbonyl)pyrrolidine-3-ca rboxylic acid, useful for stapling/stapled with another amino acid residue comprising an olefin group to form a staple through the olefin group
  SITE 12: note = (S)-2-amino-3-(thiophen-3-yl)propanoic acid
  SITE 13: note = (S)-2-amino-3-(benzo[b]thiophen-3-yl)propanoic acid
  SITE 14: note = L-glutamic acid, useful for stapling/stapled with another amino acid residue comprising a side chain amino group to form a staple through the 4-carboxyl group
  SITE 15: note = C-term amino
XDXXDXXAFKXXXEA

SEQ ID NO: 363 - protein, 15 aa, synthetic construct
  SITE 1: note = N-term hex-5-enoic acid, useful for stapling/stapled with another amino acid residue comprising an olefin group to form a staple through the olefin group
  SITE 1: note = (S)-2-methylpyrrolidine-2-carboxylic acid
  SITE 3: note = (S)-2-aminopent-4-enoic acid, useful for stapling/stapled with another amino acid residue comprising an olefin group to form a staple through the olefin group
  SITE 4: note = (R)-2-amino-2-methylhept-6-enoic acid, useful for stapling/stapled with another amino acid residue comprising an olefin group to form a staple through the olefin group
  SITE 6: note = (S)-3-(2-amino-2-carboxyethyl)benzoic acid
  SITE 7: note = 2-amino-2-methylpropanoic acid
  SITE 10: note = L-lysine, useful for stapling/stapled with another amino acid residue comprising a side chain acid group to form a staple through the 6-amino group
  SITE 11: note (S)-3-amino-1-((pent-4-en-1-yloxy)carbonyl)pyrrolidine-3-ca rboxylic acid, useful for stapling/stapled with another amino acid residue comprising an olefin group to form a staple through the olefin group
  SITE 12: note = (S)-2-amino-3-(thiophen-3-yl)propanoic acid
  SITE 13: note = (S)-2-amino-3-(benzo[b]thiophen-3-yl)propanoic acid
  SITE 14: note = L-glutamic acid, useful for stapling/stapled with another amino acid residue comprising a side chain amino group to form a staple through the 4-carboxyl group
  SITE 15: note = C-term amino
XDXXDXXAFKXXXEA

SEQ ID NO: 364 - protein, 15 aa, synthetic construct
  SITE 1: note = N-term Acetic Acid
  SITE 1: note = (R)-2-allylpyrrolidine-2-carboxylic acid, useful for stapling/stapled with another amino acid residue comprising an olefin group to form a staple through the olefin group
  SITE 3: note = (S)-2-amino-4,4-dimethylpentanoic acid
  VARIANT 4: note = 2-amino-2-(pent-4-en-1-yl)hept-6-enoic acid, useful for stapling/stapled with another amino acid residue comprising an olefin group to form a staple through one of the two olefin groups and/or with another amino acid residue comprising an olefin group to form a staple through the other of the two olefin groups
  SITE 6: note = (S)-3-(2-amino-2-carboxyethyl)benzoic acid
  SITE 7: note = (S)-2-amino-2,4-dimethylpentanoic acid
  SITE 10: note = L-lysine, useful for stapling/stapled with another amino acid residue comprising a side chain acid group to form a staple through the 6-amino group
  SITE 11: note (S)-3-amino-1-((pent-4-en-1-yloxy)carbonyl)pyrrolidine-3-ca rboxylic acid, useful for stapling/stapled with another amino acid residue comprising an olefin group to form a staple through the olefin group
  SITE 12: note = (S)-2-amino-3-(thiophen-3-yl)propanoic acid
  SITE 13: note = (S)-2-amino-3-(benzo[b]thiophen-3-yl)propanoic acid
  SITE 14: note = L-glutamic acid, useful for stapling/stapled with another amino acid residue comprising a side chain amino group to form a staple through the 4-carboxyl group
  SITE 15: note = C-term amino
XDXXDXXAFKXXXEA

SEQ ID NO: 365 - protein, 15 aa, synthetic construct
  SITE 1: note = N-term Acetic Acid
  SITE 1: note = (R)-2-allylpyrrolidine-2-carboxylic acid, useful for stapling/stapled with another amino acid residue comprising an olefin group to form a staple through the olefin group
  SITE 3: note = (S)-2-amino-4,4-dimethylpentanoic acid
  VARIANT 4: note = 2-amino-2-(pent-4-en-1-yl)hept-6-enoic acid, useful for stapling/stapled with another amino acid residue comprising an olefin group to form a staple through one of the two olefin groups and/or with another amino acid residue comprising an olefin group to form a staple through the other of the two olefin groups
  SITE 6: note = (S)-3-(2-amino-2-carboxyethyl)benzoic acid
  SITE 7: note = (R)-2-amino-2,4-dimethylpentanoic acid
  SITE 10: note = L-lysine, useful for stapling/stapled with another amino acid residue comprising a side chain acid group to form a staple through the 6-amino group
  SITE 11: note (S)-3-amino-1-((pent-4-en-1-yloxy)carbonyl)pyrrolidine-3-ca rboxylic acid, useful for stapling/stapled with another amino acid residue comprising an olefin group to form a staple through the olefin group
  SITE 12: note = (S)-2-amino-3-(thiophen-3-yl)propanoic acid
  SITE 13: note = (S)-2-amino-3-(benzo[b]thiophen-3-yl)propanoic acid
  SITE 14: note = L-glutamic acid, useful for stapling/stapled with another amino acid residue comprising a side chain amino group to form a staple through the 4-carboxyl group
  SITE 15: note = C-term amino
XDXXDXXAFKXXXEA

SEQ ID NO: 366 - protein, 15 aa, synthetic construct
  SITE 1: note = N-term Acetic Acid
  SITE 1: note = (R)-2-allylpyrrolidine-2-carboxylic acid, useful for stapling/stapled with another amino acid residue comprising an olefin group to form a staple through the olefin group
  SITE 3: note = (S)-2-amino-4,4-dimethylpentanoic acid
  VARIANT 4: note = 2-amino-2-(pent-4-en-1-yl)hept-6-enoic acid, useful for stapling/stapled with another amino acid residue comprising an olefin group to form a staple through one of the two olefin groups and/or with another amino acid residue comprising an olefin group to form a staple through the other of the two olefin groups
  SITE 6: note = (S)-3-(2-amino-2-carboxyethyl)benzoic acid
  SITE 7: note = (S)-2-amino-2,3-dimethylbutanoic acid
  SITE 10: note = L-lysine, useful for stapling/stapled with another amino acid residue comprising a side chain acid group to form a staple through the 6-amino group
  SITE 11: note (S)-3-amino-1-((pent-4-en-1-yloxy)carbonyl)pyrrolidine-3-ca rboxylic acid, useful for stapling/stapled with another amino acid residue comprising an olefin group to form a staple through the olefin group
  SITE 12: note = (S)-2-amino-3-(thiophen-3-yl)propanoic acid
  SITE 13: note = (S)-2-amino-3-(benzo[b]thiophen-3-yl)propanoic acid
  SITE 14: note = L-glutamic acid, useful for stapling/stapled with another amino acid residue comprising a side chain amino group to form a staple through the 4-carboxyl group
  SITE 15: note = C-term amino
XDXXDXXAFKXXXEA

SEQ ID NO: 367 - protein, 15 aa, synthetic construct
  SITE 1: note = N-term Acetic Acid
  SITE 1: note = (R)-2-allylpyrrolidine-2-carboxylic acid, useful for stapling/stapled with another amino acid residue comprising an olefin group to form a staple through the olefin group
  SITE 3: note = (S)-2-amino-4,4-dimethylpentanoic acid
  VARIANT 4: note = 2-amino-2-(pent-4-en-1-yl)hept-6-enoic acid, useful for stapling/stapled with another amino acid residue comprising an olefin group to form a staple through one of the two olefin groups and/or with another amino acid residue comprising an olefin group to form a staple through the other of the two olefin groups
  SITE 6: note = (S)-3-(2-amino-2-carboxyethyl)benzoic acid
  SITE 7: note = (S)-2-amino-3-hydroxy-2-methylpropanoic acid
  SITE 10: note = L-lysine, useful for stapling/stapled with another amino acid residue comprising a side chain acid group to form a staple through the 6-amino group
  SITE 11: note (S)-3-amino-1-((pent-4-en-1-yloxy)carbonyl)pyrrolidine-3-ca rboxylic acid, useful for stapling/stapled with another amino acid residue comprising an olefin group to form a staple through the olefin group
  SITE 12: note = (S)-2-amino-3-(thiophen-3-yl)propanoic acid
  SITE 13: note = (S)-2-amino-3-(benzo[b]thiophen-3-yl)propanoic acid
  SITE 14: note = L-glutamic acid, useful for stapling/stapled with another amino acid residue comprising a side chain amino group to form a staple through the 4-carboxyl group
  SITE 15: note = C-term amino
XDXXDXXAFKXXXEA

SEQ ID NO: 368 - protein, 15 aa, synthetic construct
  SITE 1: note = N-term Acetic Acid
  SITE 1: note = (R)-2-allylpyrrolidine-2-carboxylic acid, useful for stapling/stapled with another amino acid residue comprising an olefin group to form a staple through the olefin group
  SITE 3: note = (S)-2-amino-4,4-dimethylpentanoic acid
  VARIANT 4: note = 2-amino-2-(pent-4-en-1-yl)hept-6-enoic acid, useful for stapling/stapled with another amino acid residue comprising an olefin group to form a staple through one of the two olefin groups and/or with another amino acid residue comprising an olefin group to form a staple through the other of the two olefin groups
  SITE 6: note = (S)-3-(2-amino-2-carboxyethyl)benzoic acid
  SITE 7: note = (R)-2-amino-3-hydroxy-2-methylpropanoic acid
  SITE 10: note = L-lysine, useful for stapling/stapled with another amino acid residue comprising a side chain acid group to form a staple through the 6-amino group
  SITE 11: note (S)-3-amino-1-((pent-4-en-1-yloxy)carbonyl)pyrrolidine-3-ca rboxylic acid, useful for stapling/stapled with another amino acid residue comprising an olefin group to form a staple through the olefin group
  SITE 12: note = (S)-2-amino-3-(thiophen-3-yl)propanoic acid
  SITE 13: note = (S)-2-amino-3-(benzo[b]thiophen-3-yl)propanoic acid
  SITE 14: note = L-glutamic acid, useful for stapling/stapled with another amino acid residue comprising a side chain amino group to form a staple through the 4-carboxyl group
  SITE 15: note = C-term amino
XDXXDXXAFKXXXEA

SEQ ID NO: 369 - protein, 15 aa, synthetic construct
  SITE 1: note = N-term Acetic Acid
  SITE 1: note = (R)-2-allylpyrrolidine-2-carboxylic acid, useful for stapling/stapled with another amino acid residue comprising an olefin group to form a staple through the olefin group
  SITE 3: note = (S)-2-amino-4,4-dimethylpentanoic acid
  VARIANT 4: note = 2-amino-2-(pent-4-en-1-yl)hept-6-enoic acid, useful for stapling/stapled with another amino acid residue comprising an olefin group to form a staple through one of the two olefin groups and/or with another amino acid residue comprising an olefin group to form a staple through the other of the two olefin groups
  SITE 6: note = (S)-3-(2-amino-2-carboxyethyl)benzoic acid
  SITE 7: note = (S)-2-amino-2-methyl-3-phenylpropanoic acid
  SITE 10: note = L-lysine, useful for stapling/stapled with another amino acid residue comprising a side chain acid group to form a staple through the 6-amino group
  SITE 11: note (S)-3-amino-1-((pent-4-en-1-yloxy)carbonyl)pyrrolidine-3-ca rboxylic acid, useful for stapling/stapled with another amino acid residue comprising an olefin group to form a staple through the olefin group
  SITE 12: note = (S)-2-amino-3-(thiophen-3-yl)propanoic acid
  SITE 13: note = (S)-2-amino-3-(benzo[b]thiophen-3-yl)propanoic acid
  SITE 14: note = L-glutamic acid, useful for stapling/stapled with another amino acid residue comprising a side chain amino group to form a staple through the 4-carboxyl group
  SITE 15: note = C-term amino
XDXXDXXAFKXXXEA

SEQ ID NO: 370 - protein, 15 aa, synthetic construct
  SITE 1: note = N-term Acetic Acid
  SITE 1: note = (R)-2-allylpyrrolidine-2-carboxylic acid, useful for stapling/stapled with another amino acid residue comprising an olefin group to form a staple through the olefin group
  SITE 3: note = (S)-2-amino-4,4-dimethylpentanoic acid
  VARIANT 4: note = 2-amino-2-(pent-4-en-1-yl)hept-6-enoic acid, useful for stapling/stapled with another amino acid residue comprising an olefin group to form a staple through one of the two olefin groups and/or with another amino acid residue comprising an olefin group to form a staple through the other of the two olefin groups
  SITE 6: note = (S)-3-(2-amino-2-carboxyethyl)benzoic acid
  SITE 7: note = 2-amino-2-methylpropanoic acid
  SITE 8: note = 2-amino-2-methylpropanoic acid
  SITE 10: note = L-lysine, useful for stapling/stapled with another amino acid residue comprising a side chain acid group to form a staple through the 6-amino group
  SITE 11: note (S)-3-amino-1-((pent-4-en-1-yloxy)carbonyl)pyrrolidine-3-ca rboxylic acid, useful for stapling/stapled with another amino acid residue comprising an olefin group to form a staple through the olefin group
  SITE 12: note = (S)-2-amino-3-(thiophen-3-yl)propanoic acid
  SITE 13: note = (S)-2-amino-3-(benzo[b]thiophen-3-yl)propanoic acid
  SITE 14: note = L-glutamic acid, useful for stapling/stapled with another amino acid residue comprising a side chain amino group to form a staple through the 4-carboxyl group
  SITE 15: note = C-term amino
XDXXDXXXFKXXXEA

SEQ ID NO: 371 - protein, 15 aa, synthetic construct
  SITE 1: note = N-term Acetic Acid
  SITE 1: note = (R)-2-allylpyrrolidine-2-carboxylic acid, useful for stapling/stapled with another amino acid residue comprising an olefin group to form a staple through the olefin group
  SITE 3: note = (S)-2-amino-4,4-dimethylpentanoic acid
  VARIANT 4: note = 2-amino-2-(pent-4-en-1-yl)hept-6-enoic acid, useful for stapling/stapled with another amino acid residue comprising an olefin group to form a staple through one of the two olefin groups and/or with another amino acid residue comprising an olefin group to form a staple through the other of the two olefin groups
  SITE 6: note = (S)-3-(2-amino-2-carboxyethyl)benzoic acid
  SITE 7: note = 2-amino-2-methylpropanoic acid
  SITE 8: note = 1-aminocyclopropane-1-carboxylic acid
  SITE 10: note = L-lysine, useful for stapling/stapled with another amino acid residue comprising a side chain acid group to form a staple through the 6-amino group
  SITE 11: note (S)-3-amino-1-((pent-4-en-1-yloxy)carbonyl)pyrrolidine-3-ca rboxylic acid, useful for stapling/stapled with another amino acid residue comprising an olefin group to form a staple through the olefin group
  SITE 12: note = (S)-2-amino-3-(thiophen-3-yl)propanoic acid
  SITE 13: note = (S)-2-amino-3-(benzo[b]thiophen-3-yl)propanoic acid
  SITE 14: note = L-glutamic acid, useful for stapling/stapled with another amino acid residue comprising a side chain amino group to form a staple through the 4-carboxyl group
  SITE 15: note = C-term amino
XDXXDXXXFKXXXEA

SEQ ID NO: 372 - protein, 15 aa, synthetic construct
  SITE 1: note = N-term Acetic Acid
  SITE 1: note = (R)-2-allylpyrrolidine-2-carboxylic acid, useful for stapling/stapled with another amino acid residue comprising an olefin group to form a staple through the olefin group
  SITE 3: note = (S)-2-amino-4,4-dimethylpentanoic acid
  VARIANT 4: note = 2-amino-2-(pent-4-en-1-yl)hept-6-enoic acid, useful for stapling/stapled with another amino acid residue comprising an olefin group to form a staple through one of the two olefin groups and/or with another amino acid residue comprising an olefin group to form a staple through the other of the two olefin groups
  SITE 6: note = (S)-3-(2-amino-2-carboxyethyl)benzoic acid
  SITE 8: note = 2-amino-2-methylpropanoic acid
  SITE 10: note = L-lysine, useful for stapling/stapled with another amino acid residue comprising a side chain acid group to form a staple through the 6-amino group
  SITE 11: note (S)-3-amino-1-((pent-4-en-1-yloxy)carbonyl)pyrrolidine-3-ca rboxylic acid, useful for stapling/stapled with another amino acid residue comprising an olefin group to form a staple through the olefin group
  SITE 12: note = (S)-2-amino-3-(thiophen-3-yl)propanoic acid
  SITE 13: note = (S)-2-amino-3-(benzo[b]thiophen-3-yl)propanoic acid
  SITE 14: note = L-glutamic acid, useful for stapling/stapled with another amino acid residue comprising a side chain amino group to form a staple through the 4-carboxyl group
  SITE 15: note = C-term amino
XDXXDXAXFKXXXEA

SEQ ID NO: 373 - protein, 15 aa, synthetic construct
  SITE 1: note = N-term Acetic Acid
  SITE 1: note = (R)-2-allylpyrrolidine-2-carboxylic acid, useful for stapling/stapled with another amino acid residue comprising an olefin group to form a staple through the olefin group
  SITE 3: note = (S)-2-amino-4,4-dimethylpentanoic acid
  VARIANT 4: note = 2-amino-2-(pent-4-en-1-yl)hept-6-enoic acid, useful for stapling/stapled with another amino acid residue comprising an olefin group to form a staple through one of the two olefin groups and/or with another amino acid residue comprising an olefin group to form a staple through the other of the two olefin groups
  SITE 6: note = (S)-3-(2-amino-2-carboxyethyl)benzoic acid
  SITE 8: note = 1-aminocyclopropane-1-carboxylic acid
  SITE 10: note = L-lysine, useful for stapling/stapled with another amino acid residue comprising a side chain acid group to form a staple through the 6-amino group
  SITE 11: note (S)-3-amino-1-((pent-4-en-1-yloxy)carbonyl)pyrrolidine-3-ca rboxylic acid, useful for stapling/stapled with another amino acid residue comprising an olefin group to form a staple through the olefin group
  SITE 12: note = (S)-2-amino-3-(thiophen-3-yl)propanoic acid
  SITE 13: note = (S)-2-amino-3-(benzo[b]thiophen-3-yl)propanoic acid
  SITE 14: note = L-glutamic acid, useful for stapling/stapled with another amino acid residue comprising a side chain amino group to form a staple through the 4-carboxyl group
  SITE 15: note = C-term amino
XDXXDXAXFKXXXEA

SEQ ID NO: 374 - protein, 15 aa, synthetic construct
  SITE 1: note = N-term Acetic Acid
  SITE 1: note = (R)-2-allylpyrrolidine-2-carboxylic acid, useful for stapling/stapled with another amino acid residue comprising an olefin group to form a staple through the olefin group
  SITE 3: note = (S)-2-amino-4,4-dimethylpentanoic acid
  VARIANT 4: note = 2-amino-2-(pent-4-en-1-yl)hept-6-enoic acid, useful for stapling/stapled with another amino acid residue comprising an olefin group to form a staple through one of the two olefin groups and/or with another amino acid residue comprising an olefin group to form a staple through the other of the two olefin groups
  SITE 6: note = (S)-3-(2-amino-2-carboxyethyl)benzoic acid
  SITE 7: note = 2-amino-2-methylpropanoic acid
  SITE 10: note = L-lysine, useful for stapling/stapled with another amino acid residue comprising a side chain acid group to form a staple through the 6-amino group
  SITE 11: note (S)-3-amino-1-((pent-4-en-1-yloxy)carbonyl)pyrrolidine-3-ca rboxylic acid, useful for stapling/stapled with another amino acid residue comprising an olefin group to form a staple through the olefin group
  SITE 12: note = (S)-2-amino-3-(thiophen-3-yl)propanoic acid
  SITE 13: note = (S)-2-amino-3-(benzo[b]thiophen-3-yl)propanoic acid
  SITE 14: note = L-glutamic acid, useful for stapling/stapled with another amino acid residue comprising a side chain amino group to form a staple through the 4-carboxyl group
  SITE 15: note = C-term amino
XDXXDXXSFKXXXEA

SEQ ID NO: 375 - protein, 15 aa, synthetic construct
  SITE 1: note = N-term Acetic Acid
  SITE 1: note = (R)-2-allylpyrrolidine-2-carboxylic acid, useful for stapling/stapled with another amino acid residue comprising an olefin group to form a staple through the olefin group
  SITE 3: note = (S)-2-amino-4,4-dimethylpentanoic acid
  VARIANT 4: note = 2-amino-2-(pent-4-en-1-yl)hept-6-enoic acid, useful for stapling/stapled with another amino acid residue comprising an olefin group to form a staple through one of the two olefin groups and/or with another amino acid residue comprising an olefin group to form a staple through the other of the two olefin groups
  SITE 6: note = (S)-3-(2-amino-2-carboxyethyl)benzoic acid
  SITE 7: note = 2-amino-2-methylpropanoic acid
  SITE 10: note = L-lysine, useful for stapling/stapled with another amino acid residue comprising a side chain acid group to form a staple through the 6-amino group
  SITE 11: note (S)-3-amino-1-((pent-4-en-1-yloxy)carbonyl)pyrrolidine-3-ca rboxylic acid, useful for stapling/stapled with another amino acid residue comprising an olefin group to form a staple through the olefin group
  SITE 12: note = (S)-2-amino-3-(thiophen-3-yl)propanoic acid
  SITE 13: note = (S)-2-amino-3-(benzo[b]thiophen-3-yl)propanoic acid
  SITE 14: note = L-glutamic acid, useful for stapling/stapled with another amino acid residue comprising a side chain amino group to form a staple through the 4-carboxyl group
  SITE 15: note = C-term amino
XDXXDXXTFKXXXEA

SEQ ID NO: 376 - protein, 15 aa, synthetic construct
  SITE 1: note = N-term Acetic Acid
  SITE 1: note = (R)-2-allylpyrrolidine-2-carboxylic acid, useful for stapling/stapled with another amino acid residue comprising an olefin group to form a staple through the olefin group
  SITE 3: note = (S)-2-amino-4,4-dimethylpentanoic acid
  VARIANT 4: note = 2-amino-2-(pent-4-en-1-yl)hept-6-enoic acid, useful for stapling/stapled with another amino acid residue comprising an olefin group to form a staple through one of the two olefin groups and/or with another amino acid residue comprising an olefin group to form a staple through the other of the two olefin groups
  SITE 6: note = (S)-3-(2-amino-2-carboxyethyl)benzoic acid
  SITE 7: note = 2-amino-2-methylpropanoic acid
  SITE 8: note = L-allothreonine
  SITE 10: note = L-lysine, useful for stapling/stapled with another amino acid residue comprising a side chain acid group to form a staple through the 6-amino group
  SITE 11: note (S)-3-amino-1-((pent-4-en-1-yloxy)carbonyl)pyrrolidine-3-ca rboxylic acid, useful for stapling/stapled with another amino acid residue comprising an olefin group to form a staple through the olefin group
  SITE 12: note = (S)-2-amino-3-(thiophen-3-yl)propanoic acid
  SITE 13: note = (S)-2-amino-3-(benzo[b]thiophen-3-yl)propanoic acid
  SITE 14: note = L-glutamic acid, useful for stapling/stapled with another amino acid residue comprising a side chain amino group to form a staple through the 4-carboxyl group
  SITE 15: note = C-term amino
XDXXDXXTFKXXXEA

SEQ ID NO: 377 - protein, 15 aa, synthetic construct
  SITE 1: note = N-term Acetic Acid
  SITE 1: note = (R)-2-allylpyrrolidine-2-carboxylic acid, useful for stapling/stapled with another amino acid residue comprising an olefin group to form a staple through the olefin group
  SITE 3: note = (S)-2-amino-4,4-dimethylpentanoic acid
  VARIANT 4: note = 2-amino-2-(pent-4-en-1-yl)hept-6-enoic acid, useful for stapling/stapled with another amino acid residue comprising an olefin group to form a staple through one of the two olefin groups and/or with another amino acid residue comprising an olefin group to form a staple through the other of the two olefin groups
  SITE 6: note = (S)-3-(2-amino-2-carboxyethyl)benzoic acid
  SITE 7: note = 2-amino-2-methylpropanoic acid
  SITE 10: note = L-lysine, useful for stapling/stapled with another amino acid residue comprising a side chain acid group to form a staple through the 6-amino group
  SITE 11: note (S)-3-amino-1-((pent-4-en-1-yloxy)carbonyl)pyrrolidine-3-ca rboxylic acid, useful for stapling/stapled with another amino acid residue comprising an olefin group to form a staple through the olefin group
  SITE 12: note = (S)-2-amino-3-(thiophen-3-yl)propanoic acid
  SITE 13: note = (S)-2-amino-3-(benzo[b]thiophen-3-yl)propanoic acid
  SITE 14: note = L-glutamic acid, useful for stapling/stapled with another amino acid residue comprising a side chain amino group to form a staple through the 4-carboxyl group
  SITE 15: note = C-term amino
XDXXDXXVFKXXXEA

SEQ ID NO: 378 - protein, 15 aa, synthetic construct
  SITE 1: note = N-term Acetic Acid
  SITE 1: note = (R)-2-allylpyrrolidine-2-carboxylic acid, useful for stapling/stapled with another amino acid residue comprising an olefin group to form a staple through the olefin group
  SITE 3: note = (S)-2-amino-4,4-dimethylpentanoic acid
  VARIANT 4: note = 2-amino-2-(pent-4-en-1-yl)hept-6-enoic acid, useful for stapling/stapled with another amino acid residue comprising an olefin group to form a staple through one of the two olefin groups and/or with another amino acid residue comprising an olefin group to form a staple through the other of the two olefin groups
  SITE 6: note = (S)-3-(2-amino-2-carboxyethyl)benzoic acid
  SITE 7: note = 2-amino-2-methylpropanoic acid
  SITE 10: note = L-lysine, useful for stapling/stapled with another amino acid residue comprising a side chain acid group to form a staple through the 6-amino group
  SITE 11: note (S)-3-amino-1-((pent-4-en-1-yloxy)carbonyl)pyrrolidine-3-ca rboxylic acid, useful for stapling/stapled with another amino acid residue comprising an olefin group to form a staple through the olefin group
  SITE 12: note = (S)-2-amino-3-(thiophen-3-yl)propanoic acid
  SITE 13: note = (S)-2-amino-3-(benzo[b]thiophen-3-yl)propanoic acid
  SITE 14: note = L-glutamic acid, useful for stapling/stapled with another amino acid residue comprising a side chain amino group to form a staple through the 4-carboxyl group
  SITE 15: note = C-term amino
XDXXDXXLFKXXXEA

SEQ ID NO: 379 - protein, 15 aa, synthetic construct
  SITE 1: note = N-term Acetic Acid
  SITE 1: note = (R)-2-allylpyrrolidine-2-carboxylic acid, useful for stapling/stapled with another amino acid residue comprising an olefin group to form a staple through the olefin group
  SITE 3: note = (S)-2-amino-4,4-dimethylpentanoic acid
  VARIANT 4: note = 2-amino-2-(pent-4-en-1-yl)hept-6-enoic acid, useful for stapling/stapled with another amino acid residue comprising an olefin group to form a staple through one of the two olefin groups and/or with another amino acid residue comprising an olefin group to form a staple through the other of the two olefin groups
  SITE 6: note = (S)-3-(2-amino-2-carboxyethyl)benzoic acid
  SITE 7: note = 2-amino-2-methylpropanoic acid
  SITE 10: note = L-lysine, useful for stapling/stapled with another amino acid residue comprising a side chain acid group to form a staple through the 6-amino group
  SITE 11: note (S)-3-amino-1-((pent-4-en-1-yloxy)carbonyl)pyrrolidine-3-ca rboxylic acid, useful for stapling/stapled with another amino acid residue comprising an olefin group to form a staple through the olefin group
  SITE 12: note = (S)-2-amino-3-(thiophen-3-yl)propanoic acid
  SITE 13: note = (S)-2-amino-3-(benzo[b]thiophen-3-yl)propanoic acid
  SITE 14: note = L-glutamic acid, useful for stapling/stapled with another amino acid residue comprising a side chain amino group to form a staple through the 4-carboxyl group
  SITE 15: note = C-term amino
XDXXDXXQFKXXXEA

SEQ ID NO: 380 - protein, 15 aa, synthetic construct
  SITE 1: note = N-term Acetic Acid
  SITE 1: note = (R)-2-allylpyrrolidine-2-carboxylic acid, useful for stapling/stapled with another amino acid residue comprising an olefin group to form a staple through the olefin group
  SITE 3: note = (S)-2-amino-4,4-dimethylpentanoic acid
  VARIANT 4: note = 2-amino-2-(pent-4-en-1-yl)hept-6-enoic acid, useful for stapling/stapled with another amino acid residue comprising an olefin group to form a staple through one of the two olefin groups and/or with another amino acid residue comprising an olefin group to form a staple through the other of the two olefin groups
  SITE 6: note = (S)-3-(2-amino-2-carboxyethyl)benzoic acid
  SITE 7: note = 2-amino-2-methylpropanoic acid
  SITE 8: note = (S)-2-amino-5-morpholino-5-oxopentanoic acid
  SITE 10: note = L-lysine, useful for stapling/stapled with another amino acid residue comprising a side chain acid group to form a staple through the 6-amino group
  SITE 11: note (S)-3-amino-1-((pent-4-en-1-yloxy)carbonyl)pyrrolidine-3-ca rboxylic acid, useful for stapling/stapled with another amino acid residue comprising an olefin group to form a staple through the olefin group
  SITE 12: note = (S)-2-amino-3-(thiophen-3-yl)propanoic acid
  SITE 13: note = (S)-2-amino-3-(benzo[b]thiophen-3-yl)propanoic acid
  SITE 14: note = L-glutamic acid, useful for stapling/stapled with another amino acid residue comprising a side chain amino group to form a staple through the 4-carboxyl group
  SITE 15: note = C-term amino
XDXXDXXXFKXXXEA

SEQ ID NO: 381 - protein, 15 aa, synthetic construct
  SITE 1: note = N-term Acetic Acid
  SITE 1: note = (R)-2-allylpyrrolidine-2-carboxylic acid, useful for stapling/stapled with another amino acid residue comprising an olefin group to form a staple through the olefin group
  SITE 3: note = (S)-2-amino-4,4-dimethylpentanoic acid
  VARIANT 4: note = 2-amino-2-(pent-4-en-1-yl)hept-6-enoic acid, useful for stapling/stapled with another amino acid residue comprising an olefin group to form a staple through one of the two olefin groups and/or with another amino acid residue comprising an olefin group to form a staple through the other of the two olefin groups
  SITE 6: note = (S)-3-(2-amino-2-carboxyethyl)benzoic acid
  SITE 7: note = 2-amino-2-methylpropanoic acid
  SITE 10: note = L-lysine, useful for stapling/stapled with another amino acid residue comprising a side chain acid group to form a staple through the 6-amino group
  SITE 11: note (S)-3-amino-1-((pent-4-en-1-yloxy)carbonyl)pyrrolidine-3-ca rboxylic acid, useful for stapling/stapled with another amino acid residue comprising an olefin group to form a staple through the olefin group
  SITE 12: note = (S)-2-amino-3-(thiophen-3-yl)propanoic acid
  SITE 13: note = (S)-2-amino-3-(benzo[b]thiophen-3-yl)propanoic acid
  SITE 14: note = L-glutamic acid, useful for stapling/stapled with another amino acid residue comprising a side chain amino group to form a staple through the 4-carboxyl group
  SITE 15: note = C-term amino
XDXXDXXKFKXXXEA

SEQ ID NO: 382 - protein, 15 aa, synthetic construct
  SITE 1: note = N-term Acetic Acid
  SITE 1: note = (R)-2-allylpyrrolidine-2-carboxylic acid, useful for stapling/stapled with another amino acid residue comprising an olefin group to form a staple through the olefin group
  SITE 3: note = (S)-2-amino-4,4-dimethylpentanoic acid
  VARIANT 4: note = 2-amino-2-(pent-4-en-1-yl)hept-6-enoic acid, useful for stapling/stapled with another amino acid residue comprising an olefin group to form a staple through one of the two olefin groups and/or with another amino acid residue comprising an olefin group to form a staple through the other of the two olefin groups
  SITE 6: note = (S)-3-(2-amino-2-carboxyethyl)benzoic acid
  SITE 7: note = (R)-2-amino-2-methyl-3-phenylpropanoic acid
  SITE 10: note = L-lysine, useful for stapling/stapled with another amino acid residue comprising a side chain acid group to form a staple through the 6-amino group
  SITE 11: note (S)-3-amino-1-((pent-4-en-1-yloxy)carbonyl)pyrrolidine-3-ca rboxylic acid, useful for stapling/stapled with another amino acid residue comprising an olefin group to form a staple through the olefin group
  SITE 12: note = (S)-2-amino-3-(thiophen-3-yl)propanoic acid
  SITE 13: note = (S)-2-amino-3-(benzo[b]thiophen-3-yl)propanoic acid
  SITE 14: note = L-glutamic acid, useful for stapling/stapled with another amino acid residue comprising a side chain amino group to form a staple through the 4-carboxyl group
  SITE 15: note = C-term amino
XDXXDXXAFKXXXEA

SEQ ID NO: 383 - protein, 15 aa, synthetic construct
  SITE 1: note = N-term Acetic Acid
  SITE 1: note = (R)-2-allylpyrrolidine-2-carboxylic acid, useful for stapling/stapled with another amino acid residue comprising an olefin group to form a staple through the olefin group
  SITE 3: note = (S)-2-amino-4,4-dimethylpentanoic acid
  VARIANT 4: note = 2-amino-2-(pent-4-en-1-yl)hept-6-enoic acid, useful for stapling/stapled with another amino acid residue comprising an olefin group to form a staple through one of the two olefin groups and/or with another amino acid residue comprising an olefin group to form a staple through the other of the two olefin groups
  SITE 6: note = (S)-3-(2-amino-2-carboxyethyl)benzoic acid
  SITE 7: note = 2-amino-2-methylpropanoic acid
  SITE 10: note = L-lysine, useful for stapling/stapled with another amino acid residue comprising a side chain acid group to form a staple through the 6-amino group
  SITE 11: note (S)-3-amino-1-((pent-4-en-1-yloxy)carbonyl)pyrrolidine-3-ca rboxylic acid, useful for stapling/stapled with another amino acid residue comprising an olefin group to form a staple through the olefin group
  SITE 12: note = (S)-2-amino-3-(thiophen-3-yl)propanoic acid
  SITE 13: note = (S)-2-amino-3-(benzo[b]thiophen-3-yl)propanoic acid
  SITE 14: note = L-glutamic acid, useful for stapling/stapled with another amino acid residue comprising a side chain amino group to form a staple through the 4-carboxyl group
  SITE 15: note = D-alanine
  SITE 15: note = C-term amino
XDXXDXXAFKXXXEA

SEQ ID NO: 384 - protein, 16 aa, synthetic construct
  SITE 1: note = N-term Acetic Acid
  SITE 1: note = (R)-2-allylpyrrolidine-2-carboxylic acid, useful for stapling/stapled with another amino acid residue comprising an olefin group to form a staple through the olefin group
  SITE 3: note = (S)-2-amino-4,4-dimethylpentanoic acid
  VARIANT 4: note = 2-amino-2-(pent-4-en-1-yl)hept-6-enoic acid, useful for stapling/stapled with another amino acid residue comprising an olefin group to form a staple through one of the two olefin groups and/or with another amino acid residue comprising an olefin group to form a staple through the other of the two olefin groups
  SITE 6: note = (S)-3-(2-amino-2-carboxyethyl)benzoic acid
  SITE 7: note = 2-amino-2-methylpropanoic acid
  SITE 10: note = L-lysine, useful for stapling/stapled with another amino acid residue comprising a side chain acid group to form a staple through the 6-amino group
  SITE 11: note (S)-3-amino-1-((pent-4-en-1-yloxy)carbonyl)pyrrolidine-3-ca rboxylic acid, useful for stapling/stapled with another amino acid residue comprising an olefin group to form a staple through the olefin group
  SITE 12: note = (S)-2-amino-3-(thiophen-3-yl)propanoic acid
  SITE 13: note = (S)-2-amino-3-(benzo[b]thiophen-3-yl)propanoic acid
  SITE 14: note = L-glutamic acid, useful for stapling/stapled with another amino acid residue comprising a side chain amino group to form a staple through the 4-carboxyl group
  SITE 15: note = D-alanine
  SITE 16: note = C-term amino
XDXXDXXAFKXXXEAS

SEQ ID NO: 385 - protein, 15 aa, synthetic construct
  SITE 1: note = N-term Acetic Acid
  SITE 1: note = (R)-2-allylpyrrolidine-2-carboxylic acid, useful for stapling/stapled with another amino acid residue comprising an olefin group to form a staple through the olefin group
  SITE 3: note = (S)-2-amino-4,4-dimethylpentanoic acid
  VARIANT 4: note = 2-amino-2-(pent-4-en-1-yl)hept-6-enoic acid, useful for stapling/stapled with another amino acid residue comprising an olefin group to form a staple through one of the two olefin groups and/or with another amino acid residue comprising an olefin group to form a staple through the other of the two olefin groups
  SITE 6: note = (S)-3-(2-amino-2-carboxyethyl)benzoic acid
  SITE 7: note = 2-amino-2-methylpropanoic acid
  SITE 10: note = L-lysine, useful for stapling/stapled with another amino acid residue comprising a side chain acid group to form a staple through the 6-amino group
  SITE 11: note (S)-3-amino-1-((pent-4-en-1-yloxy)carbonyl)pyrrolidine-3-ca rboxylic acid, useful for stapling/stapled with another amino acid residue comprising an olefin group to form a staple through the olefin group
  SITE 12: note = (S)-2-amino-3-(thiophen-3-yl)propanoic acid
  SITE 13: note = (S)-2-amino-3-(benzo[b]thiophen-3-yl)propanoic acid
  SITE 14: note = L-glutamic acid, useful for stapling/stapled with another amino acid residue comprising a side chain amino group to form a staple through the 4-carboxyl group
  SITE 15: note = D-leucine
  SITE 15: note = C-term amino
XDXXDXXAFKXXXEL

SEQ ID NO: 386 - protein, 16 aa, synthetic construct
  SITE 1: note = N-term Acetic Acid
  SITE 1: note = (R)-2-allylpyrrolidine-2-carboxylic acid, useful for stapling/stapled with another amino acid residue comprising an olefin group to form a staple through the olefin group
  SITE 3: note = (S)-2-amino-4,4-dimethylpentanoic acid
  VARIANT 4: note = 2-amino-2-(pent-4-en-1-yl)hept-6-enoic acid, useful for stapling/stapled with another amino acid residue comprising an olefin group to form a staple through one of the two olefin groups and/or with another amino acid residue comprising an olefin group to form a staple through the other of the two olefin groups
  SITE 6: note = (S)-3-(2-amino-2-carboxyethyl)benzoic acid
  SITE 7: note = 2-amino-2-methylpropanoic acid
  SITE 10: note = L-lysine, useful for stapling/stapled with another amino acid residue comprising a side chain acid group to form a staple through the 6-amino group
  SITE 11: note (S)-3-amino-1-((pent-4-en-1-yloxy)carbonyl)pyrrolidine-3-ca rboxylic acid, useful for stapling/stapled with another amino acid residue comprising an olefin group to form a staple through the olefin group
  SITE 12: note = (S)-2-amino-3-(thiophen-3-yl)propanoic acid
  SITE 13: note = (S)-2-amino-3-(benzo[b]thiophen-3-yl)propanoic acid
  SITE 14: note = L-glutamic acid, useful for stapling/stapled with another amino acid residue comprising a side chain amino group to form a staple through the 4-carboxyl group
  SITE 15: note = D-leucine
  SITE 16: note = C-term amino
XDXXDXXAFKXXXELS

SEQ ID NO: 387 - protein, 17 aa, synthetic construct
  SITE 1: note = N-term Acetic Acid
  SITE 1: note = (R)-2-allylpyrrolidine-2-carboxylic acid, useful for stapling/stapled with another amino acid residue comprising an olefin group to form a staple through the olefin group
  SITE 3: note = (S)-2-amino-4,4-dimethylpentanoic acid
  VARIANT 4: note = 2-amino-2-(pent-4-en-1-yl)hept-6-enoic acid, useful for stapling/stapled with another amino acid residue comprising an olefin group to form a staple through one of the two olefin groups and/or with another amino acid residue comprising an olefin group to form a staple through the other of the two olefin groups
  SITE 6: note = (S)-3-(2-amino-2-carboxyethyl)benzoic acid
  SITE 7: note = 2-amino-2-methylpropanoic acid
  SITE 10: note = L-lysine, useful for stapling/stapled with another amino acid residue comprising a side chain acid group to form a staple through the 6-amino group
  SITE 11: note (S)-3-amino-1-((pent-4-en-1-yloxy)carbonyl)pyrrolidine-3-ca rboxylic acid, useful for stapling/stapled with another amino acid residue comprising an olefin group to form a staple through the olefin group
  SITE 12: note = (S)-2-amino-3-(thiophen-3-yl)propanoic acid
  SITE 13: note = (S)-2-amino-3-(benzo[b]thiophen-3-yl)propanoic acid
  SITE 14: note = L-glutamic acid, useful for stapling/stapled with another amino acid residue comprising a side chain amino group to form a staple through the 4-carboxyl group
  SITE 17: note = C-term amino
XDXXDXXAFKXXXEASL

SEQ ID NO: 388 - protein, 17 aa, synthetic construct
  SITE 1: note = N-term Acetic Acid
  SITE 1: note = (R)-2-allylpyrrolidine-2-carboxylic acid, useful for stapling/stapled with another amino acid residue comprising an olefin group to form a staple through the olefin group
  SITE 3: note = (S)-2-amino-4,4-dimethylpentanoic acid
  VARIANT 4: note = 2-amino-2-(pent-4-en-1-yl)hept-6-enoic acid, useful for stapling/stapled with another amino acid residue comprising an olefin group to form a staple through one of the two olefin groups and/or with another amino acid residue comprising an olefin group to form a staple through the other of the two olefin groups
  SITE 6: note = (S)-3-(2-amino-2-carboxyethyl)benzoic acid
  SITE 7: note = 2-amino-2-methylpropanoic acid
  SITE 10: note = L-lysine, useful for stapling/stapled with another amino acid residue comprising a side chain acid group to form a staple through the 6-amino group
  SITE 11: note (S)-3-amino-1-((pent-4-en-1-yloxy)carbonyl)pyrrolidine-3-ca rboxylic acid, useful for stapling/stapled with another amino acid residue comprising an olefin group to form a staple through the olefin group
  SITE 12: note = (S)-2-amino-3-(thiophen-3-yl)propanoic acid
  SITE 13: note = (S)-2-amino-3-(benzo[b]thiophen-3-yl)propanoic acid
  SITE 14: note = L-glutamic acid, useful for stapling/stapled with another amino acid residue comprising a side chain amino group to form a staple through the 4-carboxyl group
  SITE 17: note = C-term amino
XDXXDXXAFKXXXELSL

SEQ ID NO: 389 - protein, 17 aa, synthetic construct
  SITE 1: note = N-term Acetic Acid
  SITE 1: note = (R)-2-allylpyrrolidine-2-carboxylic acid, useful for stapling/stapled with another amino acid residue comprising an olefin group to form a staple through the olefin group
  SITE 3: note = (S)-2-amino-4,4-dimethylpentanoic acid
  VARIANT 4: note = 2-amino-2-(pent-4-en-1-yl)hept-6-enoic acid, useful for stapling/stapled with another amino acid residue comprising an olefin group to form a staple through one of the two olefin groups and/or with another amino acid residue comprising an olefin group to form a staple through the other of the two olefin groups
  SITE 6: note = (S)-3-(2-amino-2-carboxyethyl)benzoic acid
  SITE 7: note = 2-amino-2-methylpropanoic acid
  SITE 10: note = L-lysine, useful for stapling/stapled with another amino acid residue comprising a side chain acid group to form a staple through the 6-amino group
  SITE 11: note (S)-3-amino-1-((pent-4-en-1-yloxy)carbonyl)pyrrolidine-3-ca rboxylic acid, useful for stapling/stapled with another amino acid residue comprising an olefin group to form a staple through the olefin group
  SITE 12: note = (S)-2-amino-3-(thiophen-3-yl)propanoic acid
  SITE 13: note = (S)-2-amino-3-(benzo[b]thiophen-3-yl)propanoic acid
  SITE 14: note = L-glutamic acid, useful for stapling/stapled with another amino acid residue comprising a side chain amino group to form a staple through the 4-carboxyl group
  SITE 15: note = D-leucine
  SITE 17: note = C-term amino
XDXXDXXAFKXXXELSL

SEQ ID NO: 390 - protein, 15 aa, synthetic construct
  SITE 1: note = N-term Acetic Acid
  SITE 1: note = (R)-2-allylpyrrolidine-2-carboxylic acid, useful for stapling/stapled with another amino acid residue comprising an olefin group to form a staple through the olefin group
  SITE 2: note = (S)-2-hydroxysuccinic acid
  SITE 3: note = (S)-2-amino-4,4-dimethylpentanoic acid
  VARIANT 4: note = 2-amino-2-(pent-4-en-1-yl)hept-6-enoic acid, useful for stapling/stapled with another amino acid residue comprising an olefin group to form a staple through one of the two olefin groups and/or with another amino acid residue comprising an olefin group to form a staple through the other of the two olefin groups
  SITE 6: note = (S)-3-(2-amino-2-carboxyethyl)benzoic acid
  SITE 7: note = 2-amino-2-methylpropanoic acid
  SITE 10: note = L-lysine, useful for stapling/stapled with another amino acid residue comprising a side chain acid group to form a staple through the 6-amino group
  SITE 11: note (S)-3-amino-1-((pent-4-en-1-yloxy)carbonyl)pyrrolidine-3-ca rboxylic acid, useful for stapling/stapled with another amino acid residue comprising an olefin group to form a staple through the olefin group
  SITE 12: note = (S)-2-amino-3-(2-(trifluoromethyl)phenyl)propanoic acid
  SITE 13: note = (S)-2-amino-3-(benzo[b]thiophen-3-yl)propanoic acid
  SITE 14: note = L-glutamic acid, useful for stapling/stapled with another amino acid residue comprising a side chain amino group to form a staple through the 4-carboxyl group
  SITE 15: note = C-term amino
XXXXDXXAFKXXXEA

SEQ ID NO: 391 - protein, 15 aa, synthetic construct
  SITE 1: note = N-term Acetic Acid
  SITE 1: note = (R)-2-allylpyrrolidine-2-carboxylic acid, useful for stapling/stapled with another amino acid residue comprising an olefin group to form a staple through the olefin group
  SITE 3: note = (S)-2-amino-4,4-dimethylpentanoic acid
  VARIANT 4: note = 2-amino-2-(pent-4-en-1-yl)hept-6-enoic acid, useful for stapling/stapled with another amino acid residue comprising an olefin group to form a staple through one of the two olefin groups and/or with another amino acid residue comprising an olefin group to form a staple through the other of the two olefin groups
  SITE 6: note = (S)-3-(2-amino-2-carboxyethyl)benzoic acid
  SITE 7: note = 2-amino-2-methylpropanoic acid
  SITE 10: note = L-lysine, useful for stapling/stapled with another amino acid residue comprising a side chain acid group to form a staple through the 6-amino group
  SITE 11: note (S)-3-amino-1-((pent-4-en-1-yloxy)carbonyl)pyrrolidine-3-ca rboxylic acid, useful for stapling/stapled with another amino acid residue comprising an olefin group to form a staple through the olefin group
  SITE 12: note = (S)-2-amino-3-(thiophen-3-yl)propanoic acid
  SITE 13: note = (S)-2-amino-3-(benzo[b]thiophen-3-yl)propanoic acid
  SITE 14: note = L-glutamic acid, useful for stapling/stapled with another amino acid residue comprising a side chain amino group to form a staple through the 4-carboxyl group
  SITE 15: note = C-term amino
XEXXEXXAFKXXXEA

SEQ ID NO: 392 - protein, 16 aa, synthetic construct
  SITE 1: note = 2-(allyloxy)benzoic acid, useful for stapling/stapled with another amino acid residue comprising an olefin group to form a staple through the olefin group
  SITE 2: note = (S)-2-methylpyrrolidine-2-carboxylic acid
  SITE 4: note = (S)-2-aminopent-4-enoic acid, useful for stapling/stapled with another amino acid residue comprising an olefin group to form a staple through the olefin group
  SITE 5: note = (R)-2-amino-2-methylhept-6-enoic acid, useful for stapling/stapled with another amino acid residue comprising an olefin group to form a staple through the olefin group
  SITE 7: note = (S)-3-(2-amino-2-carboxyethyl)benzoic acid
  SITE 8: note = 2-amino-2-methylpropanoic acid
  SITE 11: note = L-lysine, useful for stapling/stapled with another amino acid residue comprising a side chain acid group to form a staple through the 6-amino group
  SITE 12: note (S)-3-amino-1-((pent-4-en-1-yloxy)carbonyl)pyrrolidine-3-ca rboxylic acid, useful for stapling/stapled with another amino acid residue comprising an olefin group to form a staple through the olefin group
  SITE 13: note = (S)-2-amino-3-(thiophen-3-yl)propanoic acid
  SITE 14: note = (S)-2-amino-3-(benzo[b]thiophen-3-yl)propanoic acid
  SITE 15: note = L-glutamic acid, useful for stapling/stapled with another amino acid residue comprising a side chain amino group to form a staple through the 4-carboxyl group
  SITE 16: note = C-term amino
XXDXXDXXAFKXXXEA

SEQ ID NO: 393 - protein, 15 aa, synthetic construct
  SITE 1: note = N-term Acetic Acid
  SITE 1: note = (R)-2-allylpyrrolidine-2-carboxylic acid, useful for stapling/stapled with another amino acid residue comprising an olefin group to form a staple through the olefin group
  SITE 3: note = (S)-2-amino-4,4-dimethylpentanoic acid
  VARIANT 4: note = 2-amino-2-(pent-4-en-1-yl)hept-6-enoic acid, useful for stapling/stapled with another amino acid residue comprising an olefin group to form a staple through one of the two olefin groups and/or with another amino acid residue comprising an olefin group to form a staple through the other of the two olefin groups
  SITE 6: note = (S)-3-(2-amino-2-carboxyethyl)benzoic acid
  SITE 7: note = 2-amino-2-methylpropanoic acid
  SITE 10: note = L-lysine, useful for stapling/stapled with another amino acid residue comprising a side chain acid group to form a staple through the 6-amino group
  SITE 11: note (S)-3-amino-1-((pent-4-en-1-yloxy)carbonyl)pyrrolidine-3-ca rboxylic acid, useful for stapling/stapled with another amino acid residue comprising an olefin group to form a staple through the olefin group
  SITE 12: note = (S)-2-amino-3-(2-chlorophenyl)propanoic acid
  SITE 13: note = (S)-2-amino-3-(3,4-dichlorophenyl)propanoic acid
  SITE 14: note = L-glutamic acid, useful for stapling/stapled with another amino acid residue comprising a side chain amino group to form a staple through the 4-carboxyl group
  SITE 15: note = C-term amino
XDXXDXXAFKXXXEA

SEQ ID NO: 394 - protein, 15 aa, synthetic construct
  SITE 1: note = N-term Acetic Acid
  SITE 1: note = (R)-2-allylpyrrolidine-2-carboxylic acid, useful for stapling/stapled with another amino acid residue comprising an olefin group to form a staple through the olefin group
  SITE 3: note = (S)-2-amino-4,4-dimethylpentanoic acid
  VARIANT 4: note = 2-amino-2-(pent-4-en-1-yl)hept-6-enoic acid, useful for stapling/stapled with another amino acid residue comprising an olefin group to form a staple through one of the two olefin groups and/or with another amino acid residue comprising an olefin group to form a staple through the other of the two olefin groups
  SITE 6: note = (S)-3-(2-amino-2-carboxyethyl)benzoic acid
  SITE 7: note = 2-amino-2-methylpropanoic acid
  SITE 10: note = L-lysine, useful for stapling/stapled with another amino acid residue comprising a side chain acid group to form a staple through the 6-amino group
  SITE 11: note (S)-3-amino-1-((pent-4-en-1-yloxy)carbonyl)pyrrolidine-3-ca rboxylic acid, useful for stapling/stapled with another amino acid residue comprising an olefin group to form a staple through the olefin group
  SITE 12: note = (S)-2-aminohexanoic acid
  SITE 13: note = (S)-2-amino-3-(3,4-dichlorophenyl)propanoic acid
  SITE 14: note = L-glutamic acid, useful for stapling/stapled with another amino acid residue comprising a side chain amino group to form a staple through the 4-carboxyl group
  SITE 15: note = C-term amino
XDXXDXXAFKXXXEA

SEQ ID NO: 395 - protein, 15 aa, synthetic construct
  SITE 1: note = N-term Acetic Acid
  SITE 1: note = (R)-2-allylpyrrolidine-2-carboxylic acid, useful for stapling/stapled with another amino acid residue comprising an olefin group to form a staple through the olefin group
  SITE 3: note = (S)-2-amino-4,4-dimethylpentanoic acid
  VARIANT 4: note = 2-amino-2-(pent-4-en-1-yl)hept-6-enoic acid, useful for stapling/stapled with another amino acid residue comprising an olefin group to form a staple through one of the two olefin groups and/or with another amino acid residue comprising an olefin group to form a staple through the other of the two olefin groups
  SITE 6: note = (S)-3-(2-amino-2-carboxyethyl)benzoic acid
  SITE 7: note = 2-amino-2-methylpropanoic acid
  SITE 10: note = L-lysine, useful for stapling/stapled with another amino acid residue comprising a side chain acid group to form a staple through the 6-amino group
  SITE 11: note (S)-3-amino-1-((pent-4-en-1-yloxy)carbonyl)pyrrolidine-3-ca rboxylic acid, useful for stapling/stapled with another amino acid residue comprising an olefin group to form a staple through the olefin group
  SITE 12: note = (S)-2-amino-3-cyclopentylpropanoic acid
  SITE 13: note = (S)-2-amino-3-(3,4-dichlorophenyl)propanoic acid
  SITE 14: note = L-glutamic acid, useful for stapling/stapled with another amino acid residue comprising a side chain amino group to form a staple through the 4-carboxyl group
  SITE 15: note = C-term amino
XDXXDXXAFKXXXEA

SEQ ID NO: 396 - protein, 15 aa, synthetic construct
  SITE 1: note = N-term Acetic Acid
  SITE 1: note = (R)-2-allylpyrrolidine-2-carboxylic acid, useful for stapling/stapled with another amino acid residue comprising an olefin group to form a staple through the olefin group
  SITE 3: note = (S)-2-amino-4,4-dimethylpentanoic acid
  VARIANT 4: note = 2-amino-2-(pent-4-en-1-yl)hept-6-enoic acid, useful for stapling/stapled with another amino acid residue comprising an olefin group to form a staple through one of the two olefin groups and/or with another amino acid residue comprising an olefin group to form a staple through the other of the two olefin groups
  SITE 6: note = (S)-3-(2-amino-2-carboxyethyl)benzoic acid
  SITE 7: note = 2-amino-2-methylpropanoic acid
  SITE 10: note = L-lysine, useful for stapling/stapled with another amino acid residue comprising a side chain acid group to form a staple through the 6-amino group
  SITE 11: note (S)-3-amino-1-((pent-4-en-1-yloxy)carbonyl)pyrrolidine-3-ca rboxylic acid, useful for stapling/stapled with another amino acid residue comprising an olefin group to form a staple through the olefin group
  SITE 13: note = (S)-2-amino-3-(3,4-dichlorophenyl)propanoic acid
  SITE 14: note = L-glutamic acid, useful for stapling/stapled with another amino acid residue comprising a side chain amino group to form a staple through the 4-carboxyl group
  SITE 15: note = C-term amino
XDXXDXXAYKXFXEA

SEQ ID NO: 397 - protein, 15 aa, synthetic construct
  SITE 1: note = N-term Acetic Acid
  SITE 1: note = (R)-2-allylpyrrolidine-2-carboxylic acid, useful for stapling/stapled with another amino acid residue comprising an olefin group to form a staple through the olefin group
  SITE 3: note = (S)-2-amino-4,4-dimethylpentanoic acid
  VARIANT 4: note = 2-amino-2-(pent-4-en-1-yl)hept-6-enoic acid, useful for stapling/stapled with another amino acid residue comprising an olefin group to form a staple through one of the two olefin groups and/or with another amino acid residue comprising an olefin group to form a staple through the other of the two olefin groups
  SITE 6: note = (S)-3-(2-amino-2-carboxyethyl)benzoic acid
  SITE 7: note = 2-amino-2-methylpropanoic acid
  SITE 9: note = (S)-2-amino-3-(thiophen-3-yl)propanoic acid
  SITE 10: note = L-lysine, useful for stapling/stapled with another amino acid residue comprising a side chain acid group to form a staple through the 6-amino group
  SITE 11: note (S)-3-amino-1-((pent-4-en-1-yloxy)carbonyl)pyrrolidine-3-ca rboxylic acid, useful for stapling/stapled with another amino acid residue comprising an olefin group to form a staple through the olefin group
  SITE 13: note = (S)-2-amino-3-(3,4-dichlorophenyl)propanoic acid
  SITE 14: note = L-glutamic acid, useful for stapling/stapled with another amino acid residue comprising a side chain amino group to form a staple through the 4-carboxyl group
  SITE 15: note = C-term amino
XDXXDXXAXKXFXEA

SEQ ID NO: 398 - protein, 15 aa, synthetic construct
  SITE 1: note = N-term Acetic Acid
  SITE 1: note = (R)-2-allylpyrrolidine-2-carboxylic acid, useful for stapling/stapled with another amino acid residue comprising an olefin group to form a staple through the olefin group
  SITE 3: note = (S)-2-amino-4,4-dimethylpentanoic acid
  VARIANT 4: note = 2-amino-2-(pent-4-en-1-yl)hept-6-enoic acid, useful for stapling/stapled with another amino acid residue comprising an olefin group to form a staple through one of the two olefin groups and/or with another amino acid residue comprising an olefin group to form a staple through the other of the two olefin groups
  SITE 6: note = (S)-3-(2-amino-2-carboxyethyl)benzoic acid
  SITE 7: note = 2-amino-2-methylpropanoic acid
  SITE 9: note = (S)-2-aminohexanoic acid
  SITE 10: note = L-lysine, useful for stapling/stapled with another amino acid residue comprising a side chain acid group to form a staple through the 6-amino group
  SITE 11: note (S)-3-amino-1-((pent-4-en-1-yloxy)carbonyl)pyrrolidine-3-ca rboxylic acid, useful for stapling/stapled with another amino acid residue comprising an olefin group to form a staple through the olefin group
  SITE 13: note = (S)-2-amino-3-(3,4-dichlorophenyl)propanoic acid
  SITE 14: note = L-glutamic acid, useful for stapling/stapled with another amino acid residue comprising a side chain amino group to form a staple through the 4-carboxyl group
  SITE 15: note = C-term amino
XDXXDXXAXKXFXEA

SEQ ID NO: 399 - protein, 15 aa, synthetic construct
  SITE 1: note = N-term Acetic Acid
  SITE 1: note = (R)-2-allylpyrrolidine-2-carboxylic acid, useful for stapling/stapled with another amino acid residue comprising an olefin group to form a staple through the olefin group
  SITE 3: note = (S)-2-amino-4,4-dimethylpentanoic acid
  VARIANT 4: note = 2-amino-2-(pent-4-en-1-yl)hept-6-enoic acid, useful for stapling/stapled with another amino acid residue comprising an olefin group to form a staple through one of the two olefin groups and/or with another amino acid residue comprising an olefin group to form a staple through the other of the two olefin groups
  SITE 6: note = (S)-3-(2-amino-2-carboxyethyl)benzoic acid
  SITE 7: note = 2-amino-2-methylpropanoic acid
  SITE 9: note = (S)-2-amino-3-(naphthalen-2-yl)propanoic acid
  SITE 10: note = L-lysine, useful for stapling/stapled with another amino acid residue comprising a side chain acid group to form a staple through the 6-amino group
  SITE 11: note (S)-3-amino-1-((pent-4-en-1-yloxy)carbonyl)pyrrolidine-3-ca rboxylic acid, useful for stapling/stapled with another amino acid residue comprising an olefin group to form a staple through the olefin group
  SITE 13: note = (S)-2-amino-3-(3,4-dichlorophenyl)propanoic acid
  SITE 14: note = L-glutamic acid, useful for stapling/stapled with another amino acid residue comprising a side chain amino group to form a staple through the 4-carboxyl group
  SITE 15: note = C-term amino
XDXXDXXAXKXFXEA

SEQ ID NO: 400 - protein, 15 aa, synthetic construct
  SITE 1: note = N-term Acetic Acid
  SITE 1: note = (R)-2-allylpyrrolidine-2-carboxylic acid, useful for stapling/stapled with another amino acid residue comprising an olefin group to form a staple through the olefin group
  SITE 3: note = (S)-2-amino-4,4-dimethylpentanoic acid
  VARIANT 4: note = 2-amino-2-(pent-4-en-1-yl)hept-6-enoic acid, useful for stapling/stapled with another amino acid residue comprising an olefin group to form a staple through one of the two olefin groups and/or with another amino acid residue comprising an olefin group to form a staple through the other of the two olefin groups
  SITE 6: note = (S)-3-(2-amino-2-carboxyethyl)benzoic acid
  SITE 7: note = 2-amino-2-methylpropanoic acid
  SITE 10: note = L-lysine, useful for stapling/stapled with another amino acid residue comprising a side chain acid group to form a staple through the 6-amino group
  SITE 11: note (S)-3-amino-1-((pent-4-en-1-yloxy)carbonyl)pyrrolidine-3-ca rboxylic acid, useful for stapling/stapled with another amino acid residue comprising an olefin group to form a staple through the olefin group
  SITE 13: note = (S)-2-amino-3-(naphthalen-2-yl)propanoic acid
  SITE 14: note = L-glutamic acid, useful for stapling/stapled with another amino acid residue comprising a side chain amino group to form a staple through the 4-carboxyl group
  SITE 15: note = C-term amino
XDXXDXXAFKXFXEA

SEQ ID NO: 401 - protein, 15 aa, synthetic construct
  SITE 1: note = N-term Acetic Acid
  SITE 1: note = (R)-2-allylpyrrolidine-2-carboxylic acid, useful for stapling/stapled with another amino acid residue comprising an olefin group to form a staple through the olefin group
  SITE 3: note = (S)-2-amino-4,4-dimethylpentanoic acid
  VARIANT 4: note = 2-amino-2-(pent-4-en-1-yl)hept-6-enoic acid, useful for stapling/stapled with another amino acid residue comprising an olefin group to form a staple through one of the two olefin groups and/or with another amino acid residue comprising an olefin group to form a staple through the other of the two olefin groups
  SITE 6: note = (S)-3-(2-amino-2-carboxyethyl)benzoic acid
  SITE 7: note = 2-amino-2-methylpropanoic acid
  SITE 10: note = L-lysine, useful for stapling/stapled with another amino acid residue comprising a side chain acid group to form a staple through the 6-amino group
  SITE 11: note (S)-3-amino-1-((pent-4-en-1-yloxy)carbonyl)pyrrolidine-3-ca rboxylic acid, useful for stapling/stapled with another amino acid residue comprising an olefin group to form a staple through the olefin group
  SITE 12: note = (S)-2-amino-3-(thiophen-3-yl)propanoic acid
  SITE 13: note = (S)-2-amino-3-(naphthalen-2-yl)propanoic acid
  SITE 14: note = L-glutamic acid, useful for stapling/stapled with another amino acid residue comprising a side chain amino group to form a staple through the 4-carboxyl group
  SITE 15: note = C-term amino
XDXXDXXAFKXXXEA

SEQ ID NO: 402 - protein, 15 aa, synthetic construct
  SITE 1: note = N-term Acetic Acid
  SITE 1: note = (R)-2-allylpyrrolidine-2-carboxylic acid, useful for stapling/stapled with another amino acid residue comprising an olefin group to form a staple through the olefin group
  SITE 3: note = (S)-2-amino-4,4-dimethylpentanoic acid
  VARIANT 4: note = 2-amino-2-(pent-4-en-1-yl)hept-6-enoic acid, useful for stapling/stapled with another amino acid residue comprising an olefin group to form a staple through one of the two olefin groups and/or with another amino acid residue comprising an olefin group to form a staple through the other of the two olefin groups
  SITE 6: note = (S)-3-(2-amino-2-carboxyethyl)benzoic acid
  SITE 7: note = 2-amino-2-methylpropanoic acid
  SITE 10: note = L-lysine, useful for stapling/stapled with another amino acid residue comprising a side chain acid group to form a staple through the 6-amino group
  SITE 11: note (S)-3-amino-1-((pent-4-en-1-yloxy)carbonyl)pyrrolidine-3-ca rboxylic acid, useful for stapling/stapled with another amino acid residue comprising an olefin group to form a staple through the olefin group
  SITE 12: note = (S)-2-amino-3-(2-chlorophenyl)propanoic acid
  SITE 13: note = (S)-2-amino-3-(naphthalen-2-yl)propanoic acid
  SITE 14: note = L-glutamic acid, useful for stapling/stapled with another amino acid residue comprising a side chain amino group to form a staple through the 4-carboxyl group
  SITE 15: note = C-term amino
XDXXDXXAFKXXXEA

SEQ ID NO: 403 - protein, 15 aa, synthetic construct
  SITE 1: note = N-term Acetic Acid
  SITE 1: note = (R)-2-allylpyrrolidine-2-carboxylic acid, useful for stapling/stapled with another amino acid residue comprising an olefin group to form a staple through the olefin group
  SITE 3: note = (S)-2-amino-4,4-dimethylpentanoic acid
  VARIANT 4: note = 2-amino-2-(pent-4-en-1-yl)hept-6-enoic acid, useful for stapling/stapled with another amino acid residue comprising an olefin group to form a staple through one of the two olefin groups and/or with another amino acid residue comprising an olefin group to form a staple through the other of the two olefin groups
  SITE 6: note = (S)-3-(2-amino-2-carboxyethyl)benzoic acid
  SITE 7: note = 2-amino-2-methylpropanoic acid
  SITE 10: note = L-lysine, useful for stapling/stapled with another amino acid residue comprising a side chain acid group to form a staple through the 6-amino group
  SITE 11: note (S)-3-amino-1-((pent-4-en-1-yloxy)carbonyl)pyrrolidine-3-ca rboxylic acid, useful for stapling/stapled with another amino acid residue comprising an olefin group to form a staple through the olefin group
  SITE 12: note = (S)-2-aminohexanoic acid
  SITE 13: note = (S)-2-amino-3-(naphthalen-2-yl)propanoic acid
  SITE 14: note = L-glutamic acid, useful for stapling/stapled with another amino acid residue comprising a side chain amino group to form a staple through the 4-carboxyl group
  SITE 15: note = C-term amino
XDXXDXXAFKXXXEA

SEQ ID NO: 404 - protein, 15 aa, synthetic construct
  SITE 1: note = N-term Acetic Acid
  SITE 1: note = (R)-2-allylpyrrolidine-2-carboxylic acid, useful for stapling/stapled with another amino acid residue comprising an olefin group to form a staple through the olefin group
  SITE 3: note = (S)-2-amino-4,4-dimethylpentanoic acid
  VARIANT 4: note = 2-amino-2-(pent-4-en-1-yl)hept-6-enoic acid, useful for stapling/stapled with another amino acid residue comprising an olefin group to form a staple through one of the two olefin groups and/or with another amino acid residue comprising an olefin group to form a staple through the other of the two olefin groups
  SITE 6: note = (S)-3-(2-amino-2-carboxyethyl)benzoic acid
  SITE 7: note = 2-amino-2-methylpropanoic acid
  SITE 10: note = L-lysine, useful for stapling/stapled with another amino acid residue comprising a side chain acid group to form a staple through the 6-amino group
  SITE 11: note (S)-3-amino-1-((pent-4-en-1-yloxy)carbonyl)pyrrolidine-3-ca rboxylic acid, useful for stapling/stapled with another amino acid residue comprising an olefin group to form a staple through the olefin group
  SITE 12: note = (S)-2-amino-3-cyclopentylpropanoic acid
  SITE 13: note = (S)-2-amino-3-(naphthalen-2-yl)propanoic acid
  SITE 14: note = L-glutamic acid, useful for stapling/stapled with another amino acid residue comprising a side chain amino group to form a staple through the 4-carboxyl group
  SITE 15: note = C-term amino
XDXXDXXAFKXXXEA

SEQ ID NO: 405 - protein, 17 aa, synthetic construct
  SITE 1: note = N-term Acetic Acid
  SITE 1: note = (R)-2-allylpyrrolidine-2-carboxylic acid, useful for stapling/stapled with another amino acid residue comprising an olefin group to form a staple through the olefin group
  SITE 3: note = (S)-2-amino-4,4-dimethylpentanoic acid
  VARIANT 4: note = 2-amino-2-(pent-4-en-1-yl)hept-6-enoic acid, useful for stapling/stapled with another amino acid residue comprising an olefin group to form a staple through one of the two olefin groups and/or with another amino acid residue comprising an olefin group to form a staple through the other of the two olefin groups
  SITE 6: note = (S)-3-(2-amino-2-carboxyethyl)benzoic acid
  SITE 7: note = 2-amino-2-methylpropanoic acid
  SITE 10: note = L-lysine, useful for stapling/stapled with another amino acid residue comprising a side chain acid group to form a staple through the 6-amino group
  SITE 11: note (S)-3-amino-1-((pent-4-en-1-yloxy)carbonyl)pyrrolidine-3-ca rboxylic acid, useful for stapling/stapled with another amino acid residue comprising an olefin group to form a staple through the olefin group
  SITE 12: note = (S)-2-amino-3-(thiophen-3-yl)propanoic acid
  SITE 13: note = (S)-2-amino-3-(benzo[b]thiophen-3-yl)propanoic acid
  SITE 14: note = L-glutamic acid, useful for stapling/stapled with another amino acid residue comprising a side chain amino group to form a staple through the 4-carboxyl group
  SITE 17: note = C-term amino
XDXXDXXAFKXXXELDA

SEQ ID NO: 406 - protein, 17 aa, synthetic construct
  SITE 1: note = N-term Acetic Acid
  SITE 1: note = (R)-2-allylpyrrolidine-2-carboxylic acid, useful for stapling/stapled with another amino acid residue comprising an olefin group to form a staple through the olefin group
  SITE 3: note = (S)-2-amino-4,4-dimethylpentanoic acid
  VARIANT 4: note = 2-amino-2-(pent-4-en-1-yl)hept-6-enoic acid, useful for stapling/stapled with another amino acid residue comprising an olefin group to form a staple through one of the two olefin groups and/or with another amino acid residue comprising an olefin group to form a staple through the other of the two olefin groups
  SITE 6: note = (S)-3-(2-amino-2-carboxyethyl)benzoic acid
  SITE 7: note = 2-amino-2-methylpropanoic acid
  SITE 10: note = L-lysine, useful for stapling/stapled with another amino acid residue comprising a side chain acid group to form a staple through the 6-amino group
  SITE 11: note (S)-3-amino-1-((pent-4-en-1-yloxy)carbonyl)pyrrolidine-3-ca rboxylic acid, useful for stapling/stapled with another amino acid residue comprising an olefin group to form a staple through the olefin group
  SITE 12: note = (S)-2-amino-3-(thiophen-3-yl)propanoic acid
  SITE 13: note = (S)-2-amino-3-(benzo[b]thiophen-3-yl)propanoic acid
  SITE 14: note = L-glutamic acid, useful for stapling/stapled with another amino acid residue comprising a side chain amino group to form a staple through the 4-carboxyl group
  SITE 17: note = C-term amino
XDXXDXXAFKXXXELEA

SEQ ID NO: 407 - protein, 17 aa, synthetic construct
  SITE 1: note = N-term Acetic Acid
  SITE 1: note = (R)-2-allylpyrrolidine-2-carboxylic acid, useful for stapling/stapled with another amino acid residue comprising an olefin group to form a staple through the olefin group
  SITE 3: note = (S)-2-amino-4,4-dimethylpentanoic acid
  VARIANT 4: note = 2-amino-2-(pent-4-en-1-yl)hept-6-enoic acid, useful for stapling/stapled with another amino acid residue comprising an olefin group to form a staple through one of the two olefin groups and/or with another amino acid residue comprising an olefin group to form a staple through the other of the two olefin groups
  SITE 6: note = (S)-3-(2-amino-2-carboxyethyl)benzoic acid
  SITE 7: note = 2-amino-2-methylpropanoic acid
  SITE 10: note = L-lysine, useful for stapling/stapled with another amino acid residue comprising a side chain acid group to form a staple through the 6-amino group
  SITE 11: note (S)-3-amino-1-((pent-4-en-1-yloxy)carbonyl)pyrrolidine-3-ca rboxylic acid, useful for stapling/stapled with another amino acid residue comprising an olefin group to form a staple through the olefin group
  SITE 12: note = (S)-2-amino-3-(thiophen-3-yl)propanoic acid
  SITE 13: note = (S)-2-amino-3-(benzo[b]thiophen-3-yl)propanoic acid
  SITE 14: note = L-glutamic acid, useful for stapling/stapled with another amino acid residue comprising a side chain amino group to form a staple through the 4-carboxyl group
  SITE 17: note = C-term amino
XDXXDXXAFKXXXELSA

SEQ ID NO: 408 - protein, 17 aa, synthetic construct
  SITE 1: note = N-term Acetic Acid
  SITE 1: note = (R)-2-allylpyrrolidine-2-carboxylic acid, useful for stapling/stapled with another amino acid residue comprising an olefin group to form a staple through the olefin group
  SITE 3: note = (S)-2-amino-4,4-dimethylpentanoic acid
  VARIANT 4: note = 2-amino-2-(pent-4-en-1-yl)hept-6-enoic acid, useful for stapling/stapled with another amino acid residue comprising an olefin group to form a staple through one of the two olefin groups and/or with another amino acid residue comprising an olefin group to form a staple through the other of the two olefin groups
  SITE 6: note = (S)-3-(2-amino-2-carboxyethyl)benzoic acid
  SITE 7: note = 2-amino-2-methylpropanoic acid
  SITE 10: note = L-lysine, useful for stapling/stapled with another amino acid residue comprising a side chain acid group to form a staple through the 6-amino group
  SITE 11: note (S)-3-amino-1-((pent-4-en-1-yloxy)carbonyl)pyrrolidine-3-ca rboxylic acid, useful for stapling/stapled with another amino acid residue comprising an olefin group to form a staple through the olefin group
  SITE 12: note = (S)-2-amino-3-(thiophen-3-yl)propanoic acid
  SITE 13: note = (S)-2-amino-3-(benzo[b]thiophen-3-yl)propanoic acid
  SITE 14: note = L-glutamic acid, useful for stapling/stapled with another amino acid residue comprising a side chain amino group to form a staple through the 4-carboxyl group
  SITE 17: note = C-term amino
XDXXDXXAFKXXXELTA

SEQ ID NO: 409 - protein, 17 aa, synthetic construct
  SITE 1: note = N-term Acetic Acid
  SITE 1: note = (R)-2-allylpyrrolidine-2-carboxylic acid, useful for stapling/stapled with another amino acid residue comprising an olefin group to form a staple through the olefin group
  SITE 3: note = (S)-2-amino-4,4-dimethylpentanoic acid
  VARIANT 4: note = 2-amino-2-(pent-4-en-1-yl)hept-6-enoic acid, useful for stapling/stapled with another amino acid residue comprising an olefin group to form a staple through one of the two olefin groups and/or with another amino acid residue comprising an olefin group to form a staple through the other of the two olefin groups
  SITE 6: note = (S)-3-(2-amino-2-carboxyethyl)benzoic acid
  SITE 7: note = 2-amino-2-methylpropanoic acid
  SITE 10: note = L-lysine, useful for stapling/stapled with another amino acid residue comprising a side chain acid group to form a staple through the 6-amino group
  SITE 11: note (S)-3-amino-1-((pent-4-en-1-yloxy)carbonyl)pyrrolidine-3-ca rboxylic acid, useful for stapling/stapled with another amino acid residue comprising an olefin group to form a staple through the olefin group
  SITE 12: note = (S)-2-amino-3-(thiophen-3-yl)propanoic acid
  SITE 13: note = (S)-2-amino-3-(benzo[b]thiophen-3-yl)propanoic acid
  SITE 14: note = L-glutamic acid, useful for stapling/stapled with another amino acid residue comprising a side chain amino group to form a staple through the 4-carboxyl group
  SITE 16: note = L-allothreonine
  SITE 17: note = C-term amino
XDXXDXXAFKXXXELTA

SEQ ID NO: 410 - protein, 17 aa, synthetic construct
  SITE 1: note = N-term Acetic Acid
  SITE 1: note = (R)-2-allylpyrrolidine-2-carboxylic acid, useful for stapling/stapled with another amino acid residue comprising an olefin group to form a staple through the olefin group
  SITE 3: note = (S)-2-amino-4,4-dimethylpentanoic acid
  VARIANT 4: note = 2-amino-2-(pent-4-en-1-yl)hept-6-enoic acid, useful for stapling/stapled with another amino acid residue comprising an olefin group to form a staple through one of the two olefin groups and/or with another amino acid residue comprising an olefin group to form a staple through the other of the two olefin groups
  SITE 6: note = (S)-3-(2-amino-2-carboxyethyl)benzoic acid
  SITE 7: note = 2-amino-2-methylpropanoic acid
  SITE 10: note = L-lysine, useful for stapling/stapled with another amino acid residue comprising a side chain acid group to form a staple through the 6-amino group
  SITE 11: note (S)-3-amino-1-((pent-4-en-1-yloxy)carbonyl)pyrrolidine-3-ca rboxylic acid, useful for stapling/stapled with another amino acid residue comprising an olefin group to form a staple through the olefin group
  SITE 12: note = (S)-2-amino-3-(thiophen-3-yl)propanoic acid
  SITE 13: note = (S)-2-amino-3-(benzo[b]thiophen-3-yl)propanoic acid
  SITE 14: note = L-glutamic acid, useful for stapling/stapled with another amino acid residue comprising a side chain amino group to form a staple through the 4-carboxyl group
  SITE 17: note = C-term amino
XDXXDXXAFKXXXELDL

SEQ ID NO: 411 - protein, 17 aa, synthetic construct
  SITE 1: note = N-term Acetic Acid
  SITE 1: note = (R)-2-allylpyrrolidine-2-carboxylic acid, useful for stapling/stapled with another amino acid residue comprising an olefin group to form a staple through the olefin group
  SITE 3: note = (S)-2-amino-4,4-dimethylpentanoic acid
  VARIANT 4: note = 2-amino-2-(pent-4-en-1-yl)hept-6-enoic acid, useful for stapling/stapled with another amino acid residue comprising an olefin group to form a staple through one of the two olefin groups and/or with another amino acid residue comprising an olefin group to form a staple through the other of the two olefin groups
  SITE 6: note = (S)-3-(2-amino-2-carboxyethyl)benzoic acid
  SITE 7: note = 2-amino-2-methylpropanoic acid
  SITE 10: note = L-lysine, useful for stapling/stapled with another amino acid residue comprising a side chain acid group to form a staple through the 6-amino group
  SITE 11: note (S)-3-amino-1-((pent-4-en-1-yloxy)carbonyl)pyrrolidine-3-ca rboxylic acid, useful for stapling/stapled with another amino acid residue comprising an olefin group to form a staple through the olefin group
  SITE 12: note = (S)-2-amino-3-(thiophen-3-yl)propanoic acid
  SITE 13: note = (S)-2-amino-3-(benzo[b]thiophen-3-yl)propanoic acid
  SITE 14: note = L-glutamic acid, useful for stapling/stapled with another amino acid residue comprising a side chain amino group to form a staple through the 4-carboxyl group
  SITE 17: note = C-term amino
XDXXDXXAFKXXXELEL

SEQ ID NO: 412 - protein, 17 aa, synthetic construct
  SITE 1: note = N-term Acetic Acid
  SITE 1: note = (R)-2-allylpyrrolidine-2-carboxylic acid, useful for stapling/stapled with another amino acid residue comprising an olefin group to form a staple through the olefin group
  SITE 3: note = (S)-2-amino-4,4-dimethylpentanoic acid
  VARIANT 4: note = 2-amino-2-(pent-4-en-1-yl)hept-6-enoic acid, useful for stapling/stapled with another amino acid residue comprising an olefin group to form a staple through one of the two olefin groups and/or with another amino acid residue comprising an olefin group to form a staple through the other of the two olefin groups
  SITE 6: note = (S)-3-(2-amino-2-carboxyethyl)benzoic acid
  SITE 7: note = 2-amino-2-methylpropanoic acid
  SITE 10: note = L-lysine, useful for stapling/stapled with another amino acid residue comprising a side chain acid group to form a staple through the 6-amino group
  SITE 11: note (S)-3-amino-1-((pent-4-en-1-yloxy)carbonyl)pyrrolidine-3-ca rboxylic acid, useful for stapling/stapled with another amino acid residue comprising an olefin group to form a staple through the olefin group
  SITE 12: note = (S)-2-amino-3-(thiophen-3-yl)propanoic acid
  SITE 13: note = (S)-2-amino-3-(benzo[b]thiophen-3-yl)propanoic acid
  SITE 14: note = L-glutamic acid, useful for stapling/stapled with another amino acid residue comprising a side chain amino group to form a staple through the 4-carboxyl group
  SITE 17: note = C-term amino
XDXXDXXAFKXXXEVDA

SEQ ID NO: 413 - protein, 17 aa, synthetic construct
  SITE 1: note = N-term Acetic Acid
  SITE 1: note = (R)-2-allylpyrrolidine-2-carboxylic acid, useful for stapling/stapled with another amino acid residue comprising an olefin group to form a staple through the olefin group
  SITE 3: note = (S)-2-amino-4,4-dimethylpentanoic acid
  VARIANT 4: note = 2-amino-2-(pent-4-en-1-yl)hept-6-enoic acid, useful for stapling/stapled with another amino acid residue comprising an olefin group to form a staple through one of the two olefin groups and/or with another amino acid residue comprising an olefin group to form a staple through the other of the two olefin groups
  SITE 6: note = (S)-3-(2-amino-2-carboxyethyl)benzoic acid
  SITE 7: note = 2-amino-2-methylpropanoic acid
  SITE 10: note = L-lysine, useful for stapling/stapled with another amino acid residue comprising a side chain acid group to form a staple through the 6-amino group
  SITE 11: note (S)-3-amino-1-((pent-4-en-1-yloxy)carbonyl)pyrrolidine-3-ca rboxylic acid, useful for stapling/stapled with another amino acid residue comprising an olefin group to form a staple through the olefin group
  SITE 12: note = (S)-2-amino-3-(thiophen-3-yl)propanoic acid
  SITE 13: note = (S)-2-amino-3-(benzo[b]thiophen-3-yl)propanoic acid
  SITE 14: note = L-glutamic acid, useful for stapling/stapled with another amino acid residue comprising a side chain amino group to form a staple through the 4-carboxyl group
  SITE 17: note = C-term amino
XDXXDXXAFKXXXEVEA

SEQ ID NO: 414 - protein, 17 aa, synthetic construct
  SITE 1: note = N-term Acetic Acid
  SITE 1: note = (R)-2-allylpyrrolidine-2-carboxylic acid, useful for stapling/stapled with another amino acid residue comprising an olefin group to form a staple through the olefin group
  SITE 3: note = (S)-2-amino-4,4-dimethylpentanoic acid
  VARIANT 4: note = 2-amino-2-(pent-4-en-1-yl)hept-6-enoic acid, useful for stapling/stapled with another amino acid residue comprising an olefin group to form a staple through one of the two olefin groups and/or with another amino acid residue comprising an olefin group to form a staple through the other of the two olefin groups
  SITE 6: note = (S)-3-(2-amino-2-carboxyethyl)benzoic acid
  SITE 7: note = 2-amino-2-methylpropanoic acid
  SITE 10: note = L-lysine, useful for stapling/stapled with another amino acid residue comprising a side chain acid group to form a staple through the 6-amino group
  SITE 11: note (S)-3-amino-1-((pent-4-en-1-yloxy)carbonyl)pyrrolidine-3-ca rboxylic acid, useful for stapling/stapled with another amino acid residue comprising an olefin group to form a staple through the olefin group
  SITE 12: note = (S)-2-amino-3-(thiophen-3-yl)propanoic acid
  SITE 13: note = (S)-2-amino-3-(benzo[b]thiophen-3-yl)propanoic acid
  SITE 14: note = L-glutamic acid, useful for stapling/stapled with another amino acid residue comprising a side chain amino group to form a staple through the 4-carboxyl group
  SITE 17: note = C-term amino
XDXXDXXAFKXXXEVTA

SEQ ID NO: 415 - protein, 17 aa, synthetic construct
  SITE 1: note = N-term Acetic Acid
  SITE 1: note = (R)-2-allylpyrrolidine-2-carboxylic acid, useful for stapling/stapled with another amino acid residue comprising an olefin group to form a staple through the olefin group
  SITE 3: note = (S)-2-amino-4,4-dimethylpentanoic acid
  VARIANT 4: note = 2-amino-2-(pent-4-en-1-yl)hept-6-enoic acid, useful for stapling/stapled with another amino acid residue comprising an olefin group to form a staple through one of the two olefin groups and/or with another amino acid residue comprising an olefin group to form a staple through the other of the two olefin groups
  SITE 6: note = (S)-3-(2-amino-2-carboxyethyl)benzoic acid
  SITE 7: note = 2-amino-2-methylpropanoic acid
  SITE 10: note = L-lysine, useful for stapling/stapled with another amino acid residue comprising a side chain acid group to form a staple through the 6-amino group
  SITE 11: note (S)-3-amino-1-((pent-4-en-1-yloxy)carbonyl)pyrrolidine-3-ca rboxylic acid, useful for stapling/stapled with another amino acid residue comprising an olefin group to form a staple through the olefin group
  SITE 12: note = (S)-2-amino-3-(thiophen-3-yl)propanoic acid
  SITE 13: note = (S)-2-amino-3-(benzo[b]thiophen-3-yl)propanoic acid
  SITE 14: note = L-glutamic acid, useful for stapling/stapled with another amino acid residue comprising a side chain amino group to form a staple through the 4-carboxyl group
  SITE 16: note = L-allothreonine
  SITE 17: note = C-term amino
XDXXDXXAFKXXXEVTA

SEQ ID NO: 416 - protein, 17 aa, synthetic construct
  SITE 1: note = N-term Acetic Acid
  SITE 1: note = (R)-2-allylpyrrolidine-2-carboxylic acid, useful for stapling/stapled with another amino acid residue comprising an olefin group to form a staple through the olefin group
  SITE 3: note = (S)-2-amino-4,4-dimethylpentanoic acid
  VARIANT 4: note = 2-amino-2-(pent-4-en-1-yl)hept-6-enoic acid, useful for stapling/stapled with another amino acid residue comprising an olefin group to form a staple through one of the two olefin groups and/or with another amino acid residue comprising an olefin group to form a staple through the other of the two olefin groups
  SITE 6: note = (S)-3-(2-amino-2-carboxyethyl)benzoic acid
  SITE 7: note = 2-amino-2-methylpropanoic acid
  SITE 10: note = L-lysine, useful for stapling/stapled with another amino acid residue comprising a side chain acid group to form a staple through the 6-amino group
  SITE 11: note (S)-3-amino-1-((pent-4-en-1-yloxy)carbonyl)pyrrolidine-3-ca rboxylic acid, useful for stapling/stapled with another amino acid residue comprising an olefin group to form a staple through the olefin group
  SITE 12: note = (S)-2-amino-3-(thiophen-3-yl)propanoic acid
  SITE 13: note = (S)-2-amino-3-(benzo[b]thiophen-3-yl)propanoic acid
  SITE 14: note = L-glutamic acid, useful for stapling/stapled with another amino acid residue comprising a side chain amino group to form a staple through the 4-carboxyl group
  SITE 17: note = C-term amino
XDXXDXXAFKXXXEVDL

SEQ ID NO: 417 - protein, 16 aa, synthetic construct
  SITE 1: note = N-term Acetic Acid
  SITE 2: note = (R)-2-allylpyrrolidine-2-carboxylic acid, useful for stapling/stapled with another amino acid residue comprising an olefin group to form a staple through the olefin group
  SITE 4: note = (S)-2-amino-4,4-dimethylpentanoic acid
  VARIANT 5: note = 2-amino-2-(pent-4-en-1-yl)hept-6-enoic acid, useful for stapling/stapled with another amino acid residue comprising an olefin group to form a staple through one of the two olefin groups and/or with another amino acid residue comprising an olefin group to form a staple through the other of the two olefin groups
  SITE 7: note = (S)-3-(2-amino-2-carboxyethyl)benzoic acid
  SITE 8: note = 2-amino-2-methylpropanoic acid
  SITE 11: note = L-lysine, useful for stapling/stapled with another amino acid residue comprising a side chain acid group to form a staple through the 6-amino group
  SITE 12: note (S)-3-amino-1-((pent-4-en-1-yloxy)carbonyl)pyrrolidine-3-ca rboxylic acid, useful for stapling/stapled with another amino acid residue comprising an olefin group to form a staple through the olefin group
  SITE 13: note = (S)-2-amino-3-(thiophen-3-yl)propanoic acid
  SITE 14: note = (S)-2-amino-3-(benzo[b]thiophen-3-yl)propanoic acid
  SITE 15: note = L-glutamic acid, useful for stapling/stapled with another amino acid residue comprising a side chain amino group to form a staple through the 4-carboxyl group
GXDXXDXXAFKXXXEA

SEQ ID NO: 418 - protein, 16 aa, synthetic construct
  SITE 1: note = N-term Acetic Acid
  SITE 1: note = methylglycine
  SITE 2: note = (R)-2-allylpyrrolidine-2-carboxylic acid, useful for stapling/stapled with another amino acid residue comprising an olefin group to form a staple through the olefin group
  SITE 4: note = (S)-2-amino-4,4-dimethylpentanoic acid
  VARIANT 5: note = 2-amino-2-(pent-4-en-1-yl)hept-6-enoic acid, useful for stapling/stapled with another amino acid residue comprising an olefin group to form a staple through one of the two olefin groups and/or with another amino acid residue comprising an olefin group to form a staple through the other of the two olefin groups
  SITE 7: note = (S)-3-(2-amino-2-carboxyethyl)benzoic acid
  SITE 8: note = 2-amino-2-methylpropanoic acid
  SITE 11: note = L-lysine, useful for stapling/stapled with another amino acid residue comprising a side chain acid group to form a staple through the 6-amino group
  SITE 12: note (S)-3-amino-1-((pent-4-en-1-yloxy)carbonyl)pyrrolidine-3-ca rboxylic acid, useful for stapling/stapled with another amino acid residue comprising an olefin group to form a staple through the olefin group
  SITE 13: note = (S)-2-amino-3-(thiophen-3-yl)propanoic acid
  SITE 14: note = (S)-2-amino-3-(benzo[b]thiophen-3-yl)propanoic acid
  SITE 15: note = L-glutamic acid, useful for stapling/stapled with another amino acid residue comprising a side chain amino group to form a staple through the 4-carboxyl group
  SITE 16: note = C-term amino
GXDXXDXXAFKXXXEA

SEQ ID NO: 419 - protein, 16 aa, synthetic construct
  SITE 1: note = N-term Acetic Acid
  SITE 1: note = 3-(methylamino)propanoic acid
  SITE 2: note = (R)-2-allylpyrrolidine-2-carboxylic acid, useful for stapling/stapled with another amino acid residue comprising an olefin group to form a staple through the olefin group
  SITE 4: note = (S)-2-amino-4,4-dimethylpentanoic acid
  VARIANT 5: note = 2-amino-2-(pent-4-en-1-yl)hept-6-enoic acid, useful for stapling/stapled with another amino acid residue comprising an olefin group to form a staple through one of the two olefin groups and/or with another amino acid residue comprising an olefin group to form a staple through the other of the two olefin groups
  SITE 7: note = (S)-3-(2-amino-2-carboxyethyl)benzoic acid
  SITE 8: note = 2-amino-2-methylpropanoic acid
  SITE 11: note = L-lysine, useful for stapling/stapled with another amino acid residue comprising a side chain acid group to form a staple through the 6-amino group
  SITE 12: note (S)-3-amino-1-((pent-4-en-1-yloxy)carbonyl)pyrrolidine-3-ca rboxylic acid, useful for stapling/stapled with another amino acid residue comprising an olefin group to form a staple through the olefin group
  SITE 13: note = (S)-2-amino-3-(thiophen-3-yl)propanoic acid
  SITE 14: note = (S)-2-amino-3-(benzo[b]thiophen-3-yl)propanoic acid
  SITE 15: note = L-glutamic acid, useful for stapling/stapled with another amino acid residue comprising a side chain amino group to form a staple through the 4-carboxyl group
  SITE 16: note = C-term amino
XXDXXDXXAFKXXXEA

SEQ ID NO: 420 - protein, 15 aa, synthetic construct
  SITE 1: note = N-term Acetic Acid
  SITE 1: note = (R)-2-allylpyrrolidine-2-carboxylic acid, useful for stapling/stapled with another amino acid residue comprising an olefin group to form a staple through the olefin group
  SITE 3: note = (S)-2-amino-4,4-dimethylpentanoic acid
  VARIANT 4: note = 2-amino-2-(pent-4-en-1-yl)hept-6-enoic acid, useful for stapling/stapled with another amino acid residue comprising an olefin group to form a staple through one of the two olefin groups and/or with another amino acid residue comprising an olefin group to form a staple through the other of the two olefin groups
  SITE 6: note = (S)-3-(2-amino-2-carboxyethyl)benzoic acid
  SITE 7: note = 2-amino-2-methylpropanoic acid
  SITE 10: note = L-lysine, useful for stapling/stapled with another amino acid residue comprising a side chain acid group to form a staple through the 6-amino group
  SITE 11: note (S)-3-amino-1-((pent-4-en-1-yloxy)carbonyl)pyrrolidine-3-ca rboxylic acid, useful for stapling/stapled with another amino acid residue comprising an olefin group to form a staple through the olefin group
  SITE 12: note = (S)-2-amino-3-(thiophen-3-yl)propanoic acid
  SITE 13: note = (S)-2-amino-3-(benzo[b]thiophen-3-yl)propanoic acid
  SITE 14: note = L-glutamic acid, useful for stapling/stapled with another amino acid residue comprising a side chain amino group to form a staple through the 4-carboxyl group
  SITE 15: note (S)-39-amino-5,33-dioxo-1-((3aS,4S,6aR)-2-oxohexahydro-1H-t hieno [3,4-d]imidazol-4-yl)-9,12,15,18,21,24,27,30-octaoxa-6,34- diazatetracontan-40-oic acid
  SITE 15: note = C-term amino
XDXXDXXAFKXXXEX

SEQ ID NO: 421 - protein, 15 aa, synthetic construct
  SITE 1: note = N-term Acetic Acid
  SITE 1: note = (R)-2-allylpyrrolidine-2-carboxylic acid, useful for stapling/stapled with another amino acid residue comprising an olefin group to form a staple through the olefin group
  SITE 3: note = (S)-2-amino-4,4-dimethylpentanoic acid
  VARIANT 4: note = 2-amino-2-(pent-4-en-1-yl)hept-6-enoic acid, useful for stapling/stapled with another amino acid residue comprising an olefin group to form a staple through one of the two olefin groups and/or with another amino acid residue comprising an olefin group to form a staple through the other of the two olefin groups
  SITE 6: note = (S)-3-(2-amino-2-carboxyethyl)benzoic acid
  SITE 7: note = 2-amino-2-methylpropanoic acid
  SITE 10: note = L-lysine, useful for stapling/stapled with another amino acid residue comprising a side chain acid group to form a staple through the 6-amino group
  SITE 11: note (S)-3-amino-1-((pent-4-en-1-yloxy)carbonyl)pyrrolidine-3-ca rboxylic acid, useful for stapling/stapled with another amino acid residue comprising an olefin group to form a staple through the olefin group
  SITE 12: note = (S)-2-amino-3-(thiophen-3-yl)propanoic acid
  SITE 13: note = (S)-2-amino-3-(benzo[b]thiophen-3-yl)propanoic acid
  SITE 14: note = L-glutamic acid, useful for stapling/stapled with another amino acid residue comprising a side chain amino group to form a staple through the 4-carboxyl group
  SITE 15: note (S)-39-amino-5,33-dioxo-1-((3aS,4S,6aR)-2-oxohexahydro-1H-t hieno [3,4-d]imidazol-4-yl)-9,12,15,18,21,24,27,30-octaoxa-6,34- diazatetracontan-40-oic acid
  SITE 15: note = C-term amino
XEXXEXXAFKXXXEX

SEQ ID NO: 422 - protein, 15 aa, synthetic construct
  SITE 1: note = N-term hex-5-enoic acid, useful for stapling/stapled with another amino acid residue comprising an olefin group to form a staple through the olefin group
  SITE 1: note = (S)-2-methylpyrrolidine-2-carboxylic acid
  SITE 3: note = (S)-3-(allyl(benzyl)amino)-2-aminopropanoic acid, useful for stapling/stapled with another amino acid residue comprising an olefin group to form a staple through the olefin group
  SITE 4: note = (R)-2-amino-2-methylhept-6-enoic acid, useful for stapling/stapled with another amino acid residue comprising an olefin group to form a staple through the olefin group
  SITE 6: note = (S)-3-(2-amino-2-carboxyethyl)benzoic acid
  SITE 7: note = 2-amino-2-methylpropanoic acid
  SITE 10: note = L-lysine, useful for stapling/stapled with another amino acid residue comprising a side chain acid group to form a staple through the 6-amino group
  SITE 11: note (S)-3-amino-1-((pent-4-en-1-yloxy)carbonyl)pyrrolidine-3-ca rboxylic acid, useful for stapling/stapled with another amino acid residue comprising an olefin group to form a staple through the olefin group
  SITE 12: note = (S)-2-amino-3-(thiophen-3-yl)propanoic acid
  SITE 13: note = (S)-2-amino-3-(benzo[b]thiophen-3-yl)propanoic acid
  SITE 14: note = L-glutamic acid, useful for stapling/stapled with another amino acid residue comprising a side chain amino group to form a staple through the 4-carboxyl group
  SITE 15: note = C-term amino
XDXXDXXAFKXXXEA

SEQ ID NO: 423 - protein, 15 aa, synthetic construct
  SITE 1: note = N-term hex-5-enoic acid, useful for stapling/stapled with another amino acid residue comprising an olefin group to form a staple through the olefin group
  SITE 1: note = (S)-2-methylpyrrolidine-2-carboxylic acid
  SITE 3: note = (S)-3-(N-allylbenzamido)-2-aminopropanoic acid, useful for stapling/stapled with another amino acid residue comprising an olefin group to form a staple through the olefin group
  SITE 4: note = (R)-2-amino-2-methylhept-6-enoic acid, useful for stapling/stapled with another amino acid residue comprising an olefin group to form a staple through the olefin group
  SITE 6: note = (S)-3-(2-amino-2-carboxyethyl)benzoic acid
  SITE 7: note = 2-amino-2-methylpropanoic acid
  SITE 10: note = L-lysine, useful for stapling/stapled with another amino acid residue comprising a side chain acid group to form a staple through the 6-amino group
  SITE 11: note (S)-3-amino-1-((pent-4-en-1-yloxy)carbonyl)pyrrolidine-3-ca rboxylic acid, useful for stapling/stapled with another amino acid residue comprising an olefin group to form a staple through the olefin group
  SITE 12: note = (S)-2-amino-3-(thiophen-3-yl)propanoic acid
  SITE 13: note = (S)-2-amino-3-(benzo[b]thiophen-3-yl)propanoic acid
  SITE 14: note = L-glutamic acid, useful for stapling/stapled with another amino acid residue comprising a side chain amino group to form a staple through the 4-carboxyl group
  SITE 15: note = C-term amino
XDXXDXXAFKXXXEA

SEQ ID NO: 424 - protein, 15 aa, synthetic construct
  SITE 1: note = N-term Acetic Acid
  SITE 1: note = (R)-2-allylpyrrolidine-2-carboxylic acid, useful for stapling/stapled with another amino acid residue comprising an olefin group to form a staple through the olefin group
  SITE 3: note = (S)-2-amino-4,4-dimethylpentanoic acid
  VARIANT 4: note = 2-amino-2-(pent-4-en-1-yl)hept-6-enoic acid, useful for stapling/stapled with another amino acid residue comprising an olefin group to form a staple through one of the two olefin groups and/or with another amino acid residue comprising an olefin group to form a staple through the other of the two olefin groups
  SITE 6: note = (S)-3-(2-amino-2-carboxyethyl)benzoic acid
  SITE 7: note = 2-amino-2-methylpropanoic acid
  SITE 10: note = L-lysine, useful for stapling/stapled with another amino acid residue comprising a side chain acid group to form a staple through the 6-amino group
  SITE 11: note (S)-3-amino-1-((pent-4-en-1-yloxy)carbonyl)pyrrolidine-3-ca rboxylic acid, useful for stapling/stapled with another amino acid residue comprising an olefin group to form a staple through the olefin group
  SITE 12: note = (S)-2-amino-3-(thiophen-3-yl)propanoic acid
  SITE 13: note = (S)-2-amino-3-(benzo[b]thiophen-3-yl)propanoic acid
  SITE 14: note = L-glutamic acid, useful for stapling/stapled with another amino acid residue comprising a side chain amino group to form a staple through the 4-carboxyl group
  SITE 15: note = C-term amino
XDXXDXXDFKXXXEA

SEQ ID NO: 425 - protein, 15 aa, synthetic construct
  SITE 1: note = N-term Acetic Acid
  SITE 1: note = (R)-2-allylpyrrolidine-2-carboxylic acid, useful for stapling/stapled with another amino acid residue comprising an olefin group to form a staple through the olefin group
  SITE 3: note = (S)-2-amino-4,4-dimethylpentanoic acid
  VARIANT 4: note = 2-amino-2-(pent-4-en-1-yl)hept-6-enoic acid, useful for stapling/stapled with another amino acid residue comprising an olefin group to form a staple through one of the two olefin groups and/or with another amino acid residue comprising an olefin group to form a staple through the other of the two olefin groups
  SITE 5: note = L-allothreonine
  SITE 6: note = (S)-3-(2-amino-2-carboxyethyl)benzoic acid
  SITE 7: note = 2-amino-2-methylpropanoic acid
  SITE 10: note = L-lysine, useful for stapling/stapled with another amino acid residue comprising a side chain acid group to form a staple through the 6-amino group
  SITE 11: note (S)-3-amino-1-((pent-4-en-1-yloxy)carbonyl)pyrrolidine-3-ca rboxylic acid, useful for stapling/stapled with another amino acid residue comprising an olefin group to form a staple through the olefin group
  SITE 12: note = (S)-2-amino-3-(thiophen-3-yl)propanoic acid
  SITE 13: note = (S)-2-amino-3-(benzo[b]thiophen-3-yl)propanoic acid
  SITE 14: note = L-glutamic acid, useful for stapling/stapled with another amino acid residue comprising a side chain amino group to form a staple through the 4-carboxyl group
  SITE 15: note = C-term amino
XDXXTXXDFKXXXEA

SEQ ID NO: 426 - protein, 15 aa, synthetic construct
  SITE 1: note = N-term Acetic Acid
  SITE 1: note = (R)-2-allylpyrrolidine-2-carboxylic acid, useful for stapling/stapled with another amino acid residue comprising an olefin group to form a staple through the olefin group
  SITE 3: note = (S)-2-amino-4,4-dimethylpentanoic acid
  VARIANT 4: note = 2-amino-2-(pent-4-en-1-yl)hept-6-enoic acid, useful for stapling/stapled with another amino acid residue comprising an olefin group to form a staple through one of the two olefin groups and/or with another amino acid residue comprising an olefin group to form a staple through the other of the two olefin groups
  SITE 6: note = (S)-3-(2-amino-2-carboxyethyl)benzoic acid
  SITE 7: note = 2-amino-2-methylpropanoic acid
  SITE 10: note = L-lysine, useful for stapling/stapled with another amino acid residue comprising a side chain acid group to form a staple through the 6-amino group
  SITE 11: note (S)-3-amino-1-((pent-4-en-1-yloxy)carbonyl)pyrrolidine-3-ca rboxylic acid, useful for stapling/stapled with another amino acid residue comprising an olefin group to form a staple through the olefin group
  SITE 12: note = (S)-2-amino-3-(thiophen-3-yl)propanoic acid
  SITE 13: note = (S)-2-amino-3-(benzo[b]thiophen-3-yl)propanoic acid
  SITE 14: note = L-glutamic acid, useful for stapling/stapled with another amino acid residue comprising a side chain amino group to form a staple through the 4-carboxyl group
  SITE 15: note = C-term amino
XDXXDXXEFKXXXEA

SEQ ID NO: 427 - protein, 15 aa, synthetic construct
  SITE 1: note = N-term Acetic Acid
  SITE 1: note = (R)-2-allylpyrrolidine-2-carboxylic acid, useful for stapling/stapled with another amino acid residue comprising an olefin group to form a staple through the olefin group
  SITE 3: note = (S)-2-amino-4,4-dimethylpentanoic acid
  VARIANT 4: note = 2-amino-2-(pent-4-en-1-yl)hept-6-enoic acid, useful for stapling/stapled with another amino acid residue comprising an olefin group to form a staple through one of the two olefin groups and/or with another amino acid residue comprising an olefin group to form a staple through the other of the two olefin groups
  SITE 5: note = L-allothreonine
  SITE 6: note = (S)-3-(2-amino-2-carboxyethyl)benzoic acid
  SITE 7: note = 2-amino-2-methylpropanoic acid
  SITE 10: note = L-lysine, useful for stapling/stapled with another amino acid residue comprising a side chain acid group to form a staple through the 6-amino group
  SITE 11: note (S)-3-amino-1-((pent-4-en-1-yloxy)carbonyl)pyrrolidine-3-ca rboxylic acid, useful for stapling/stapled with another amino acid residue comprising an olefin group to form a staple through the olefin group
  SITE 12: note = (S)-2-amino-3-(thiophen-3-yl)propanoic acid
  SITE 13: note = (S)-2-amino-3-(benzo[b]thiophen-3-yl)propanoic acid
  SITE 14: note = L-glutamic acid, useful for stapling/stapled with another amino acid residue comprising a side chain amino group to form a staple through the 4-carboxyl group
  SITE 15: note = C-term amino
XDXXTXXEFKXXXEA

SEQ ID NO: 428 - protein, 15 aa, synthetic construct
  SITE 1: note = N-term Acetic Acid
  SITE 1: note = (R)-2-allylpyrrolidine-2-carboxylic acid, useful for stapling/stapled with another amino acid residue comprising an olefin group to form a staple through the olefin group
  SITE 3: note = (S)-2-amino-4,4-dimethylpentanoic acid
  VARIANT 4: note = 2-amino-2-(pent-4-en-1-yl)hept-6-enoic acid, useful for stapling/stapled with another amino acid residue comprising an olefin group to form a staple through one of the two olefin groups and/or with another amino acid residue comprising an olefin group to form a staple through the other of the two olefin groups
  SITE 6: note = (S)-3-(2-amino-2-carboxyethyl)benzoic acid
  SITE 7: note = 2-amino-2-methylpropanoic acid
  SITE 8: note = (S)-2-aminohexanedioic acid
  SITE 10: note = L-lysine, useful for stapling/stapled with another amino acid residue comprising a side chain acid group to form a staple through the 6-amino group
  SITE 11: note (S)-3-amino-1-((pent-4-en-1-yloxy)carbonyl)pyrrolidine-3-ca rboxylic acid, useful for stapling/stapled with another amino acid residue comprising an olefin group to form a staple through the olefin group
  SITE 12: note = (S)-2-amino-3-(thiophen-3-yl)propanoic acid
  SITE 13: note = (S)-2-amino-3-(benzo[b]thiophen-3-yl)propanoic acid
  SITE 14: note = L-glutamic acid, useful for stapling/stapled with another amino acid residue comprising a side chain amino group to form a staple through the 4-carboxyl group
  SITE 15: note = C-term amino
XDXXDXXXFKXXXEA

SEQ ID NO: 429 - protein, 15 aa, synthetic construct
  SITE 1: note = N-term Acetic Acid
  SITE 1: note = (R)-2-allylpyrrolidine-2-carboxylic acid, useful for stapling/stapled with another amino acid residue comprising an olefin group to form a staple through the olefin group
  SITE 3: note = (S)-2-amino-4,4-dimethylpentanoic acid
  VARIANT 4: note = 2-amino-2-(pent-4-en-1-yl)hept-6-enoic acid, useful for stapling/stapled with another amino acid residue comprising an olefin group to form a staple through one of the two olefin groups and/or with another amino acid residue comprising an olefin group to form a staple through the other of the two olefin groups
  SITE 5: note = L-allothreonine
  SITE 6: note = (S)-3-(2-amino-2-carboxyethyl)benzoic acid
  SITE 7: note = 2-amino-2-methylpropanoic acid
  SITE 8: note = (S)-2-aminohexanedioic acid
  SITE 10: note = L-lysine, useful for stapling/stapled with another amino acid residue comprising a side chain acid group to form a staple through the 6-amino group
  SITE 11: note (S)-3-amino-1-((pent-4-en-1-yloxy)carbonyl)pyrrolidine-3-ca rboxylic acid, useful for stapling/stapled with another amino acid residue comprising an olefin group to form a staple through the olefin group
  SITE 12: note = (S)-2-amino-3-(thiophen-3-yl)propanoic acid
  SITE 13: note = (S)-2-amino-3-(benzo[b]thiophen-3-yl)propanoic acid
  SITE 14: note = L-glutamic acid, useful for stapling/stapled with another amino acid residue comprising a side chain amino group to form a staple through the 4-carboxyl group
  SITE 15: note = C-term amino
XDXXTXXXFKXXXEA

SEQ ID NO: 430 - protein, 15 aa, synthetic construct
  SITE 1: note = N-term Acetic Acid
  SITE 1: note = (R)-2-allylpyrrolidine-2-carboxylic acid, useful for stapling/stapled with another amino acid residue comprising an olefin group to form a staple through the olefin group
  SITE 3: note = (S)-2-amino-4,4-dimethylpentanoic acid
  VARIANT 4: note = 2-amino-2-(pent-4-en-1-yl)hept-6-enoic acid, useful for stapling/stapled with another amino acid residue comprising an olefin group to form a staple through one of the two olefin groups and/or with another amino acid residue comprising an olefin group to form a staple through the other of the two olefin groups
  SITE 6: note = (S)-3-(2-amino-2-carboxyethyl)benzoic acid
  SITE 7: note = 2-amino-2-methylpropanoic acid
  SITE 8: note = (S)-2-aminohexanoic acid
  SITE 10: note = L-lysine, useful for stapling/stapled with another amino acid residue comprising a side chain acid group to form a staple through the 6-amino group
  SITE 11: note (S)-3-amino-1-((pent-4-en-1-yloxy)carbonyl)pyrrolidine-3-ca rboxylic acid, useful for stapling/stapled with another amino acid residue comprising an olefin group to form a staple through the olefin group
  SITE 12: note = (S)-2-amino-3-(thiophen-3-yl)propanoic acid
  SITE 13: note = (S)-2-amino-3-(benzo[b]thiophen-3-yl)propanoic acid
  SITE 14: note = L-glutamic acid, useful for stapling/stapled with another amino acid residue comprising a side chain amino group to form a staple through the 4-carboxyl group
  SITE 15: note = C-term amino
XDXXDXXXFKXXXEA

SEQ ID NO: 431 - protein, 15 aa, synthetic construct
  SITE 1: note = N-term Acetic Acid
  SITE 1: note = (R)-2-allylpyrrolidine-2-carboxylic acid, useful for stapling/stapled with another amino acid residue comprising an olefin group to form a staple through the olefin group
  SITE 3: note = (S)-2-amino-4,4-dimethylpentanoic acid
  VARIANT 4: note = 2-amino-2-(pent-4-en-1-yl)hept-6-enoic acid, useful for stapling/stapled with another amino acid residue comprising an olefin group to form a staple through one of the two olefin groups and/or with another amino acid residue comprising an olefin group to form a staple through the other of the two olefin groups
  SITE 6: note = (S)-3-(2-amino-2-carboxyethyl)benzoic acid
  SITE 7: note = 2-amino-2-methylpropanoic acid
  SITE 10: note = L-lysine, useful for stapling/stapled with another amino acid residue comprising a side chain acid group to form a staple through the 6-amino group
  SITE 11: note (S)-3-amino-1-((pent-4-en-1-yloxy)carbonyl)pyrrolidine-3-ca rboxylic acid, useful for stapling/stapled with another amino acid residue comprising an olefin group to form a staple through the olefin group
  SITE 12: note = (S)-2-amino-3-(thiophen-3-yl)propanoic acid
  SITE 13: note = (S)-2-amino-3-(benzo[b]thiophen-3-yl)propanoic acid
  SITE 14: note = L-glutamic acid, useful for stapling/stapled with another amino acid residue comprising a side chain amino group to form a staple through the 4-carboxyl group
  SITE 15: note = C-term amino
XDXXDXXFFKXXXEA

SEQ ID NO: 432 - protein, 15 aa, synthetic construct
  SITE 1: note = N-term Acetic Acid
  SITE 1: note = (R)-2-allylpyrrolidine-2-carboxylic acid, useful for stapling/stapled with another amino acid residue comprising an olefin group to form a staple through the olefin group
  SITE 3: note = (S)-2-amino-4,4-dimethylpentanoic acid
  VARIANT 4: note = 2-amino-2-(pent-4-en-1-yl)hept-6-enoic acid, useful for stapling/stapled with another amino acid residue comprising an olefin group to form a staple through one of the two olefin groups and/or with another amino acid residue comprising an olefin group to form a staple through the other of the two olefin groups
  SITE 6: note = (S)-3-(2-amino-2-carboxyethyl)benzoic acid
  SITE 7: note = 2-amino-2-methylpropanoic acid
  SITE 8: note = (S)-2-amino-4-phenylbutanoic acid
  SITE 10: note = L-lysine, useful for stapling/stapled with another amino acid residue comprising a side chain acid group to form a staple through the 6-amino group
  SITE 11: note (S)-3-amino-1-((pent-4-en-1-yloxy)carbonyl)pyrrolidine-3-ca rboxylic acid, useful for stapling/stapled with another amino acid residue comprising an olefin group to form a staple through the olefin group
  SITE 12: note = (S)-2-amino-3-(thiophen-3-yl)propanoic acid
  SITE 13: note = (S)-2-amino-3-(benzo[b]thiophen-3-yl)propanoic acid
  SITE 14: note = L-glutamic acid, useful for stapling/stapled with another amino acid residue comprising a side chain amino group to form a staple through the 4-carboxyl group
  SITE 15: note = C-term amino
XDXXDXXXFKXXXEA

SEQ ID NO: 433 - protein, 15 aa, synthetic construct
  SITE 1: note = N-term Acetic Acid
  SITE 1: note = (R)-2-allylpyrrolidine-2-carboxylic acid, useful for stapling/stapled with another amino acid residue comprising an olefin group to form a staple through the olefin group
  SITE 3: note = (S)-2-amino-4,4-dimethylpentanoic acid
  VARIANT 4: note = 2-amino-2-(pent-4-en-1-yl)hept-6-enoic acid, useful for stapling/stapled with another amino acid residue comprising an olefin group to form a staple through one of the two olefin groups and/or with another amino acid residue comprising an olefin group to form a staple through the other of the two olefin groups
  SITE 6: note = (S)-3-(2-amino-2-carboxyethyl)benzoic acid
  SITE 7: note = 2-amino-2-methylpropanoic acid
  SITE 8: note = (S)-2-amino-3-cyclobutylpropanoic acid
  SITE 10: note = L-lysine, useful for stapling/stapled with another amino acid residue comprising a side chain acid group to form a staple through the 6-amino group
  SITE 11: note (S)-3-amino-1-((pent-4-en-1-yloxy)carbonyl)pyrrolidine-3-ca rboxylic acid, useful for stapling/stapled with another amino acid residue comprising an olefin group to form a staple through the olefin group
  SITE 12: note = (S)-2-amino-3-(thiophen-3-yl)propanoic acid
  SITE 13: note = (S)-2-amino-3-(benzo[b]thiophen-3-yl)propanoic acid
  SITE 14: note = L-glutamic acid, useful for stapling/stapled with another amino acid residue comprising a side chain amino group to form a staple through the 4-carboxyl group
  SITE 15: note = C-term amino
XDXXDXXXFKXXXEA

SEQ ID NO: 434 - protein, 15 aa, synthetic construct
  SITE 1: note = N-term Acetic Acid
  SITE 1: note = (R)-2-allylpyrrolidine-2-carboxylic acid, useful for stapling/stapled with another amino acid residue comprising an olefin group to form a staple through the olefin group
  SITE 3: note = (S)-2-amino-4,4-dimethylpentanoic acid
  VARIANT 4: note = 2-amino-2-(pent-4-en-1-yl)hept-6-enoic acid, useful for stapling/stapled with another amino acid residue comprising an olefin group to form a staple through one of the two olefin groups and/or with another amino acid residue comprising an olefin group to form a staple through the other of the two olefin groups
  SITE 6: note = (S)-3-(2-amino-2-carboxyethyl)benzoic acid
  SITE 7: note = 2-amino-2-methylpropanoic acid
  SITE 8: note = (S)-2-amino-4-(4-hydroxyphenyl)butanoic acid
  SITE 10: note = L-lysine, useful for stapling/stapled with another amino acid residue comprising a side chain acid group to form a staple through the 6-amino group
  SITE 11: note (S)-3-amino-1-((pent-4-en-1-yloxy)carbonyl)pyrrolidine-3-ca rboxylic acid, useful for stapling/stapled with another amino acid residue comprising an olefin group to form a staple through the olefin group
  SITE 12: note = (S)-2-amino-3-(thiophen-3-yl)propanoic acid
  SITE 13: note = (S)-2-amino-3-(benzo[b]thiophen-3-yl)propanoic acid
  SITE 14: note = L-glutamic acid, useful for stapling/stapled with another amino acid residue comprising a side chain amino group to form a staple through the 4-carboxyl group
  SITE 15: note = C-term amino
XDXXDXXXFKXXXEA

SEQ ID NO: 435 - protein, 15 aa, synthetic construct
  SITE 1: note = N-term Acetic Acid
  SITE 1: note = (R)-2-allylpyrrolidine-2-carboxylic acid, useful for stapling/stapled with another amino acid residue comprising an olefin group to form a staple through the olefin group
  SITE 3: note = (S)-2-amino-4,4-dimethylpentanoic acid
  VARIANT 4: note = 2-amino-2-(pent-4-en-1-yl)hept-6-enoic acid, useful for stapling/stapled with another amino acid residue comprising an olefin group to form a staple through one of the two olefin groups and/or with another amino acid residue comprising an olefin group to form a staple through the other of the two olefin groups
  SITE 6: note = (S)-3-(2-amino-2-carboxyethyl)benzoic acid
  SITE 7: note = 2-amino-2-methylpropanoic acid
  SITE 8: note = N6-acetyl-L-lysine
  SITE 10: note = L-lysine, useful for stapling/stapled with another amino acid residue comprising a side chain acid group to form a staple through the 6-amino group
  SITE 11: note (S)-3-amino-1-((pent-4-en-1-yloxy)carbonyl)pyrrolidine-3-ca rboxylic acid, useful for stapling/stapled with another amino acid residue comprising an olefin group to form a staple through the olefin group
  SITE 12: note = (S)-2-amino-3-(thiophen-3-yl)propanoic acid
  SITE 13: note = (S)-2-amino-3-(benzo[b]thiophen-3-yl)propanoic acid
  SITE 14: note = L-glutamic acid, useful for stapling/stapled with another amino acid residue comprising a side chain amino group to form a staple through the 4-carboxyl group
  SITE 15: note = C-term amino
XDXXDXXKFKXXXEA

SEQ ID NO: 436 - protein, 15 aa, synthetic construct
  SITE 1: note = N-term Acetic Acid
  SITE 1: note = (R)-2-allylpyrrolidine-2-carboxylic acid, useful for stapling/stapled with another amino acid residue comprising an olefin group to form a staple through the olefin group
  SITE 3: note = (S)-2-amino-4,4-dimethylpentanoic acid
  VARIANT 4: note = 2-amino-2-(pent-4-en-1-yl)hept-6-enoic acid, useful for stapling/stapled with another amino acid residue comprising an olefin group to form a staple through one of the two olefin groups and/or with another amino acid residue comprising an olefin group to form a staple through the other of the two olefin groups
  SITE 6: note = (S)-3-(2-amino-2-carboxyethyl)benzoic acid
  SITE 7: note = 2-amino-2-methylpropanoic acid
  SITE 10: note = L-lysine, useful for stapling/stapled with another amino acid residue comprising a side chain acid group to form a staple through the 6-amino group
  SITE 11: note (S)-3-amino-1-((pent-4-en-1-yloxy)carbonyl)pyrrolidine-3-ca rboxylic acid, useful for stapling/stapled with another amino acid residue comprising an olefin group to form a staple through the olefin group
  SITE 13: note = (S)-2-amino-3-(benzo[b]thiophen-3-yl)propanoic acid
  SITE 14: note = L-glutamic acid, useful for stapling/stapled with another amino acid residue comprising a side chain amino group to form a staple through the 4-carboxyl group
  SITE 15: note = C-term amino
XDXXDXXAFKXVXEA

SEQ ID NO: 437 - protein, 15 aa, synthetic construct
  SITE 1: note = N-term Acetic Acid
  SITE 1: note = (R)-2-allylpyrrolidine-2-carboxylic acid, useful for stapling/stapled with another amino acid residue comprising an olefin group to form a staple through the olefin group
  SITE 3: note = (S)-2-amino-4,4-dimethylpentanoic acid
  VARIANT 4: note = 2-amino-2-(pent-4-en-1-yl)hept-6-enoic acid, useful for stapling/stapled with another amino acid residue comprising an olefin group to form a staple through one of the two olefin groups and/or with another amino acid residue comprising an olefin group to form a staple through the other of the two olefin groups
  SITE 6: note = (S)-3-(2-amino-2-carboxyethyl)benzoic acid
  SITE 7: note = 2-amino-2-methylpropanoic acid
  SITE 10: note = L-lysine, useful for stapling/stapled with another amino acid residue comprising a side chain acid group to form a staple through the 6-amino group
  SITE 11: note (S)-3-amino-1-((pent-4-en-1-yloxy)carbonyl)pyrrolidine-3-ca rboxylic acid, useful for stapling/stapled with another amino acid residue comprising an olefin group to form a staple through the olefin group
  SITE 13: note = (S)-2-amino-3-(benzo[b]thiophen-3-yl)propanoic acid
  SITE 14: note = L-glutamic acid, useful for stapling/stapled with another amino acid residue comprising a side chain amino group to form a staple through the 4-carboxyl group
  SITE 15: note = C-term amino
XDXXDXXAFKXIXEA

SEQ ID NO: 438 - protein, 15 aa, synthetic construct
  SITE 1: note = N-term Acetic Acid
  SITE 1: note = (R)-2-allylpyrrolidine-2-carboxylic acid, useful for stapling/stapled with another amino acid residue comprising an olefin group to form a staple through the olefin group
  SITE 3: note = (S)-2-amino-4,4-dimethylpentanoic acid
  VARIANT 4: note = 2-amino-2-(pent-4-en-1-yl)hept-6-enoic acid, useful for stapling/stapled with another amino acid residue comprising an olefin group to form a staple through one of the two olefin groups and/or with another amino acid residue comprising an olefin group to form a staple through the other of the two olefin groups
  SITE 6: note = (S)-3-(2-amino-2-carboxyethyl)benzoic acid
  SITE 7: note = 2-amino-2-methylpropanoic acid
  SITE 10: note = L-lysine, useful for stapling/stapled with another amino acid residue comprising a side chain acid group to form a staple through the 6-amino group
  SITE 11: note (S)-3-amino-1-((pent-4-en-1-yloxy)carbonyl)pyrrolidine-3-ca rboxylic acid, useful for stapling/stapled with another amino acid residue comprising an olefin group to form a staple through the olefin group
  SITE 12: note = (S)-2-amino-2-cyclohexylacetic acid
  SITE 13: note = (S)-2-amino-3-(benzo[b]thiophen-3-yl)propanoic acid
  SITE 14: note = L-glutamic acid, useful for stapling/stapled with another amino acid residue comprising a side chain amino group to form a staple through the 4-carboxyl group
  SITE 15: note = C-term amino
XDXXDXXAFKXXXEA

SEQ ID NO: 439 - protein, 15 aa, synthetic construct
  SITE 1: note = N-term Acetic Acid
  SITE 1: note = (R)-2-allylpyrrolidine-2-carboxylic acid, useful for stapling/stapled with another amino acid residue comprising an olefin group to form a staple through the olefin group
  SITE 3: note = (S)-2-amino-4,4-dimethylpentanoic acid
  VARIANT 4: note = 2-amino-2-(pent-4-en-1-yl)hept-6-enoic acid, useful for stapling/stapled with another amino acid residue comprising an olefin group to form a staple through one of the two olefin groups and/or with another amino acid residue comprising an olefin group to form a staple through the other of the two olefin groups
  SITE 6: note = (S)-3-(2-amino-2-carboxyethyl)benzoic acid
  SITE 7: note = 2-amino-2-methylpropanoic acid
  SITE 10: note = L-lysine, useful for stapling/stapled with another amino acid residue comprising a side chain acid group to form a staple through the 6-amino group
  SITE 11: note (S)-3-amino-1-((pent-4-en-1-yloxy)carbonyl)pyrrolidine-3-ca rboxylic acid, useful for stapling/stapled with another amino acid residue comprising an olefin group to form a staple through the olefin group
  SITE 12: note = (S)-2-amino-3-ethylpentanoic acid
  SITE 13: note = (S)-2-amino-3-(benzo[b]thiophen-3-yl)propanoic acid
  SITE 14: note = L-glutamic acid, useful for stapling/stapled with another amino acid residue comprising a side chain amino group to form a staple through the 4-carboxyl group
  SITE 15: note = C-term amino
XDXXDXXAFKXXXEA

SEQ ID NO: 440 - protein, 15 aa, synthetic construct
  SITE 1: note = N-term Acetic Acid
  SITE 1: note = (R)-2-allylpyrrolidine-2-carboxylic acid, useful for stapling/stapled with another amino acid residue comprising an olefin group to form a staple through the olefin group
  SITE 3: note = (S)-2-amino-4,4-dimethylpentanoic acid
  VARIANT 4: note = 2-amino-2-(pent-4-en-1-yl)hept-6-enoic acid, useful for stapling/stapled with another amino acid residue comprising an olefin group to form a staple through one of the two olefin groups and/or with another amino acid residue comprising an olefin group to form a staple through the other of the two olefin groups
  SITE 6: note = (S)-3-(2-amino-2-carboxyethyl)benzoic acid
  SITE 7: note = 2-amino-2-methylpropanoic acid
  SITE 10: note = L-lysine, useful for stapling/stapled with another amino acid residue comprising a side chain acid group to form a staple through the 6-amino group
  SITE 11: note (S)-3-amino-1-((pent-4-en-1-yloxy)carbonyl)pyrrolidine-3-ca rboxylic acid, useful for stapling/stapled with another amino acid residue comprising an olefin group to form a staple through the olefin group
  SITE 12: note = (S)-2-aminoheptanoic acid
  SITE 13: note = (S)-2-amino-3-(benzo[b]thiophen-3-yl)propanoic acid
  SITE 14: note = L-glutamic acid, useful for stapling/stapled with another amino acid residue comprising a side chain amino group to form a staple through the 4-carboxyl group
  SITE 15: note = C-term amino
XDXXDXXAFKXXXEA

SEQ ID NO: 441 - protein, 15 aa, synthetic construct
  SITE 1: note = N-term Acetic Acid
  SITE 1: note = (R)-2-allylpyrrolidine-2-carboxylic acid, useful for stapling/stapled with another amino acid residue comprising an olefin group to form a staple through the olefin group
  SITE 3: note = (S)-2-amino-4,4-dimethylpentanoic acid
  VARIANT 4: note = 2-amino-2-(pent-4-en-1-yl)hept-6-enoic acid, useful for stapling/stapled with another amino acid residue comprising an olefin group to form a staple through one of the two olefin groups and/or with another amino acid residue comprising an olefin group to form a staple through the other of the two olefin groups
  SITE 6: note = (S)-3-(2-amino-2-carboxyethyl)benzoic acid
  SITE 7: note = 2-amino-2-methylpropanoic acid
  SITE 10: note = L-lysine, useful for stapling/stapled with another amino acid residue comprising a side chain acid group to form a staple through the 6-amino group
  SITE 11: note (S)-3-amino-1-((pent-4-en-1-yloxy)carbonyl)pyrrolidine-3-ca rboxylic acid, useful for stapling/stapled with another amino acid residue comprising an olefin group to form a staple through the olefin group
  SITE 12: note = (S)-2-aminodecanoic acid
  SITE 13: note = (S)-2-amino-3-(benzo[b]thiophen-3-yl)propanoic acid
  SITE 14: note = L-glutamic acid, useful for stapling/stapled with another amino acid residue comprising a side chain amino group to form a staple through the 4-carboxyl group
  SITE 15: note = C-term amino
XDXXDXXAFKXXXEA

SEQ ID NO: 442 - protein, 15 aa, synthetic construct
  SITE 1: note = N-term Acetic Acid
  SITE 1: note = (R)-2-allylpyrrolidine-2-carboxylic acid, useful for stapling/stapled with another amino acid residue comprising an olefin group to form a staple through the olefin group
  SITE 3: note = (S)-2-amino-4,4-dimethylpentanoic acid
  VARIANT 4: note = 2-amino-2-(pent-4-en-1-yl)hept-6-enoic acid, useful for stapling/stapled with another amino acid residue comprising an olefin group to form a staple through one of the two olefin groups and/or with another amino acid residue comprising an olefin group to form a staple through the other of the two olefin groups
  SITE 6: note = (S)-3-(2-amino-2-carboxyethyl)benzoic acid
  SITE 7: note = 2-amino-2-methylpropanoic acid
  SITE 10: note = L-lysine, useful for stapling/stapled with another amino acid residue comprising a side chain acid group to form a staple through the 6-amino group
  SITE 11: note (S)-3-amino-1-((pent-4-en-1-yloxy)carbonyl)pyrrolidine-3-ca rboxylic acid, useful for stapling/stapled with another amino acid residue comprising an olefin group to form a staple through the olefin group
  SITE 12: note = (S)-2-amino-3-(thiophen-2-yl)propanoic acid
  SITE 13: note = (S)-2-amino-3-(benzo[b]thiophen-3-yl)propanoic acid
  SITE 14: note = L-glutamic acid, useful for stapling/stapled with another amino acid residue comprising a side chain amino group to form a staple through the 4-carboxyl group
  SITE 15: note = C-term amino
XDXXDXXAFKXXXEA

SEQ ID NO: 443 - protein, 15 aa, synthetic construct
  SITE 1: note = N-term Acetic Acid
  SITE 1: note = (R)-2-allylpyrrolidine-2-carboxylic acid, useful for stapling/stapled with another amino acid residue comprising an olefin group to form a staple through the olefin group
  SITE 3: note = (S)-2-amino-4,4-dimethylpentanoic acid
  VARIANT 4: note = 2-amino-2-(pent-4-en-1-yl)hept-6-enoic acid, useful for stapling/stapled with another amino acid residue comprising an olefin group to form a staple through one of the two olefin groups and/or with another amino acid residue comprising an olefin group to form a staple through the other of the two olefin groups
  SITE 6: note = (S)-3-(2-amino-2-carboxyethyl)benzoic acid
  SITE 7: note = 2-amino-2-methylpropanoic acid
  SITE 10: note = L-lysine, useful for stapling/stapled with another amino acid residue comprising a side chain acid group to form a staple through the 6-amino group
  SITE 11: note (S)-3-amino-1-((pent-4-en-1-yloxy)carbonyl)pyrrolidine-3-ca rboxylic acid, useful for stapling/stapled with another amino acid residue comprising an olefin group to form a staple through the olefin group
  SITE 12: note = (S)-2-amino-3-(2-carbamoylphenyl)propanoic acid
  SITE 13: note = (S)-2-amino-3-(benzo[b]thiophen-3-yl)propanoic acid
  SITE 14: note = L-glutamic acid, useful for stapling/stapled with another amino acid residue comprising a side chain amino group to form a staple through the 4-carboxyl group
  SITE 15: note = C-term amino
XDXXDXXAFKXXXEA

SEQ ID NO: 444 - protein, 15 aa, synthetic construct
  SITE 1: note = N-term Acetic Acid
  SITE 1: note = (R)-2-allylpyrrolidine-2-carboxylic acid, useful for stapling/stapled with another amino acid residue comprising an olefin group to form a staple through the olefin group
  SITE 3: note = (S)-2-amino-4,4-dimethylpentanoic acid
  VARIANT 4: note = 2-amino-2-(pent-4-en-1-yl)hept-6-enoic acid, useful for stapling/stapled with another amino acid residue comprising an olefin group to form a staple through one of the two olefin groups and/or with another amino acid residue comprising an olefin group to form a staple through the other of the two olefin groups
  SITE 6: note = (S)-3-(2-amino-2-carboxyethyl)benzoic acid
  SITE 7: note = 2-amino-2-methylpropanoic acid
  SITE 10: note = L-lysine, useful for stapling/stapled with another amino acid residue comprising a side chain acid group to form a staple through the 6-amino group
  SITE 11: note (S)-3-amino-1-((pent-4-en-1-yloxy)carbonyl)pyrrolidine-3-ca rboxylic acid, useful for stapling/stapled with another amino acid residue comprising an olefin group to form a staple through the olefin group
  SITE 12: note = (S)-2-amino-3-(thiophen-3-yl)propanoic acid
  SITE 13: note = (S)-2-amino-3-(benzo[b]thiophen-3-yl)propanoic acid
  SITE 14: note = L-glutamic acid, useful for stapling/stapled with another amino acid residue comprising a side chain amino group to form a staple through the 4-carboxyl group
  SITE 15: note = C-term amino
XEXXDXXAFKXXXEA

SEQ ID NO: 445 - protein, 15 aa, synthetic construct
  SITE 1: note = N-term Acetic Acid
  SITE 1: note = (R)-2-allylpyrrolidine-2-carboxylic acid, useful for stapling/stapled with another amino acid residue comprising an olefin group to form a staple through the olefin group
  SITE 2: note = (S)-2-aminohexanedioic acid
  SITE 3: note = (S)-2-amino-4,4-dimethylpentanoic acid
  VARIANT 4: note = 2-amino-2-(pent-4-en-1-yl)hept-6-enoic acid, useful for stapling/stapled with another amino acid residue comprising an olefin group to form a staple through one of the two olefin groups and/or with another amino acid residue comprising an olefin group to form a staple through the other of the two olefin groups
  SITE 6: note = (S)-3-(2-amino-2-carboxyethyl)benzoic acid
  SITE 7: note = 2-amino-2-methylpropanoic acid
  SITE 10: note = L-lysine, useful for stapling/stapled with another amino acid residue comprising a side chain acid group to form a staple through the 6-amino group
  SITE 11: note (S)-3-amino-1-((pent-4-en-1-yloxy)carbonyl)pyrrolidine-3-ca rboxylic acid, useful for stapling/stapled with another amino acid residue comprising an olefin group to form a staple through the olefin group
  SITE 12: note = (S)-2-amino-3-(thiophen-3-yl)propanoic acid
  SITE 13: note = (S)-2-amino-3-(benzo[b]thiophen-3-yl)propanoic acid
  SITE 14: note = L-glutamic acid, useful for stapling/stapled with another amino acid residue comprising a side chain amino group to form a staple through the 4-carboxyl group
  SITE 15: note = C-term amino
XXXXDXXAFKXXXEA

SEQ ID NO: 446 - protein, 15 aa, synthetic construct
  SITE 1: note = N-term Acetic Acid
  SITE 1: note = (R)-2-allylpyrrolidine-2-carboxylic acid, useful for stapling/stapled with another amino acid residue comprising an olefin group to form a staple through the olefin group
  SITE 3: note = (S)-2-amino-4,4-dimethylpentanoic acid
  VARIANT 4: note = 2-amino-2-(pent-4-en-1-yl)hept-6-enoic acid, useful for stapling/stapled with another amino acid residue comprising an olefin group to form a staple through one of the two olefin groups and/or with another amino acid residue comprising an olefin group to form a staple through the other of the two olefin groups
  SITE 6: note = (S)-3-(2-amino-2-carboxyethyl)benzoic acid
  SITE 7: note = 2-amino-2-methylpropanoic acid
  SITE 10: note = L-lysine, useful for stapling/stapled with another amino acid residue comprising a side chain acid group to form a staple through the 6-amino group
  SITE 11: note (S)-3-amino-1-((pent-4-en-1-yloxy)carbonyl)pyrrolidine-3-ca rboxylic acid, useful for stapling/stapled with another amino acid residue comprising an olefin group to form a staple through the olefin group
  SITE 12: note = (S)-2-amino-3-(thiophen-3-yl)propanoic acid
  SITE 13: note = (S)-2-amino-3-(benzo[b]thiophen-3-yl)propanoic acid
  SITE 14: note = L-glutamic acid, useful for stapling/stapled with another amino acid residue comprising a side chain amino group to form a staple through the 4-carboxyl group
  SITE 15: note = C-term amino
XDXXEXXAFKXXXEA

SEQ ID NO: 447 - protein, 15 aa, synthetic construct
  SITE 1: note = N-term Acetic Acid
  SITE 1: note = (R)-2-allylpyrrolidine-2-carboxylic acid, useful for stapling/stapled with another amino acid residue comprising an olefin group to form a staple through the olefin group
  SITE 3: note = (S)-2-amino-4,4-dimethylpentanoic acid
  VARIANT 4: note = 2-amino-2-(pent-4-en-1-yl)hept-6-enoic acid, useful for stapling/stapled with another amino acid residue comprising an olefin group to form a staple through one of the two olefin groups and/or with another amino acid residue comprising an olefin group to form a staple through the other of the two olefin groups
  SITE 5: note = (S)-2-aminohexanedioic acid
  SITE 6: note = (S)-3-(2-amino-2-carboxyethyl)benzoic acid
  SITE 7: note = 2-amino-2-methylpropanoic acid
  SITE 10: note = L-lysine, useful for stapling/stapled with another amino acid residue comprising a side chain acid group to form a staple through the 6-amino group
  SITE 11: note (S)-3-amino-1-((pent-4-en-1-yloxy)carbonyl)pyrrolidine-3-ca rboxylic acid, useful for stapling/stapled with another amino acid residue comprising an olefin group to form a staple through the olefin group
  SITE 12: note = (S)-2-amino-3-(thiophen-3-yl)propanoic acid
  SITE 13: note = (S)-2-amino-3-(benzo[b]thiophen-3-yl)propanoic acid
  SITE 14: note = L-glutamic acid, useful for stapling/stapled with another amino acid residue comprising a side chain amino group to form a staple through the 4-carboxyl group
  SITE 15: note = C-term amino
XDXXXXXAFKXXXEA

SEQ ID NO: 448 - protein, 15 aa, synthetic construct
  SITE 1: note = N-term Acetic Acid
  SITE 1: note = (R)-2-allylpyrrolidine-2-carboxylic acid, useful for stapling/stapled with another amino acid residue comprising an olefin group to form a staple through the olefin group
  SITE 2: note = (S)-2-aminohexanedioic acid
  SITE 3: note = (S)-2-amino-4,4-dimethylpentanoic acid
  VARIANT 4: note = 2-amino-2-(pent-4-en-1-yl)hept-6-enoic acid, useful for stapling/stapled with another amino acid residue comprising an olefin group to form a staple through one of the two olefin groups and/or with another amino acid residue comprising an olefin group to form a staple through the other of the two olefin groups
  SITE 6: note = (S)-3-(2-amino-2-carboxyethyl)benzoic acid
  SITE 7: note = 2-amino-2-methylpropanoic acid
  SITE 10: note = L-lysine, useful for stapling/stapled with another amino acid residue comprising a side chain acid group to form a staple through the 6-amino group
  SITE 11: note (S)-3-amino-1-((pent-4-en-1-yloxy)carbonyl)pyrrolidine-3-ca rboxylic acid, useful for stapling/stapled with another amino acid residue comprising an olefin group to form a staple through the olefin group
  SITE 12: note = (S)-2-amino-3-(thiophen-3-yl)propanoic acid
  SITE 13: note = (S)-2-amino-3-(benzo[b]thiophen-3-yl)propanoic acid
  SITE 14: note = L-glutamic acid, useful for stapling/stapled with another amino acid residue comprising a side chain amino group to form a staple through the 4-carboxyl group
  SITE 15: note = C-term amino
XXXXEXXAFKXXXEA

SEQ ID NO: 449 - protein, 15 aa, synthetic construct
  SITE 1: note = N-term Acetic Acid
  SITE 1: note = (R)-2-allylpyrrolidine-2-carboxylic acid, useful for stapling/stapled with another amino acid residue comprising an olefin group to form a staple through the olefin group
  SITE 3: note = (S)-2-amino-4,4-dimethylpentanoic acid
  VARIANT 4: note = 2-amino-2-(pent-4-en-1-yl)hept-6-enoic acid, useful for stapling/stapled with another amino acid residue comprising an olefin group to form a staple through one of the two olefin groups and/or with another amino acid residue comprising an olefin group to form a staple through the other of the two olefin groups
  SITE 5: note = (S)-2-aminohexanedioic acid
  SITE 6: note = (S)-3-(2-amino-2-carboxyethyl)benzoic acid
  SITE 7: note = 2-amino-2-methylpropanoic acid
  SITE 10: note = L-lysine, useful for stapling/stapled with another amino acid residue comprising a side chain acid group to form a staple through the 6-amino group
  SITE 11: note (S)-3-amino-1-((pent-4-en-1-yloxy)carbonyl)pyrrolidine-3-ca rboxylic acid, useful for stapling/stapled with another amino acid residue comprising an olefin group to form a staple through the olefin group
  SITE 12: note = (S)-2-amino-3-(thiophen-3-yl)propanoic acid
  SITE 13: note = (S)-2-amino-3-(benzo[b]thiophen-3-yl)propanoic acid
  SITE 14: note = L-glutamic acid, useful for stapling/stapled with another amino acid residue comprising a side chain amino group to form a staple through the 4-carboxyl group
  SITE 15: note = C-term amino
XEXXXXXAFKXXXEA

SEQ ID NO: 450 - protein, 15 aa, synthetic construct
  SITE 1: note = N-term Acetic Acid
  SITE 1: note = (R)-2-allylpyrrolidine-2-carboxylic acid, useful for stapling/stapled with another amino acid residue comprising an olefin group to form a staple through the olefin group
  SITE 2: note = (S)-2-aminohexanedioic acid
  SITE 3: note = (S)-2-amino-4,4-dimethylpentanoic acid
  VARIANT 4: note = 2-amino-2-(pent-4-en-1-yl)hept-6-enoic acid, useful for stapling/stapled with another amino acid residue comprising an olefin group to form a staple through one of the two olefin groups and/or with another amino acid residue comprising an olefin group to form a staple through the other of the two olefin groups
  SITE 5: note = (S)-2-aminohexanedioic acid
  SITE 6: note = (S)-3-(2-amino-2-carboxyethyl)benzoic acid
  SITE 7: note = 2-amino-2-methylpropanoic acid
  SITE 10: note = L-lysine, useful for stapling/stapled with another amino acid residue comprising a side chain acid group to form a staple through the 6-amino group
  SITE 11: note (S)-3-amino-1-((pent-4-en-1-yloxy)carbonyl)pyrrolidine-3-ca rboxylic acid, useful for stapling/stapled with another amino acid residue comprising an olefin group to form a staple through the olefin group
  SITE 12: note = (S)-2-amino-3-(thiophen-3-yl)propanoic acid
  SITE 13: note = (S)-2-amino-3-(benzo[b]thiophen-3-yl)propanoic acid
  SITE 14: note = L-glutamic acid, useful for stapling/stapled with another amino acid residue comprising a side chain amino group to form a staple through the 4-carboxyl group
  SITE 15: note = C-term amino
XXXXXXXAFKXXXEA

SEQ ID NO: 451 - protein, 15 aa, synthetic construct
  SITE 1: note = N-term Acetic Acid
  SITE 1: note = (R)-2-allylpyrrolidine-2-carboxylic acid, useful for stapling/stapled with another amino acid residue comprising an olefin group to form a staple through the olefin group
  SITE 3: note = (S)-2-amino-4,4-dimethylpentanoic acid
  VARIANT 4: note = 2-amino-2-(pent-4-en-1-yl)hept-6-enoic acid, useful for stapling/stapled with another amino acid residue comprising an olefin group to form a staple through one of the two olefin groups and/or with another amino acid residue comprising an olefin group to form a staple through the other of the two olefin groups
  SITE 7: note = 2-amino-2-methylpropanoic acid
  SITE 10: note = L-lysine, useful for stapling/stapled with another amino acid residue comprising a side chain acid group to form a staple through the 6-amino group
  SITE 11: note (S)-3-amino-1-((pent-4-en-1-yloxy)carbonyl)pyrrolidine-3-ca rboxylic acid, useful for stapling/stapled with another amino acid residue comprising an olefin group to form a staple through the olefin group
  SITE 12: note = (S)-2-amino-3-(thiophen-3-yl)propanoic acid
  SITE 13: note = (S)-2-amino-3-(benzo[b]thiophen-3-yl)propanoic acid
  SITE 14: note = L-glutamic acid, useful for stapling/stapled with another amino acid residue comprising a side chain amino group to form a staple through the 4-carboxyl group
  SITE 15: note = C-term amino
XEXXEEXAFKXXXEA

SEQ ID NO: 452 - protein, 15 aa, synthetic construct
  SITE 1: note = N-term Acetic Acid
  SITE 1: note = (R)-2-allylpyrrolidine-2-carboxylic acid, useful for stapling/stapled with another amino acid residue comprising an olefin group to form a staple through the olefin group
  SITE 2: note = (S)-2-aminohexanedioic acid
  SITE 3: note = (S)-2-amino-4,4-dimethylpentanoic acid
  VARIANT 4: note = 2-amino-2-(pent-4-en-1-yl)hept-6-enoic acid, useful for stapling/stapled with another amino acid residue comprising an olefin group to form a staple through one of the two olefin groups and/or with another amino acid residue comprising an olefin group to form a staple through the other of the two olefin groups
  SITE 7: note = 2-amino-2-methylpropanoic acid
  SITE 10: note = L-lysine, useful for stapling/stapled with another amino acid residue comprising a side chain acid group to form a staple through the 6-amino group
  SITE 11: note (S)-3-amino-1-((pent-4-en-1-yloxy)carbonyl)pyrrolidine-3-ca rboxylic acid, useful for stapling/stapled with another amino acid residue comprising an olefin group to form a staple through the olefin group
  SITE 12: note = (S)-2-amino-3-(thiophen-3-yl)propanoic acid
  SITE 13: note = (S)-2-amino-3-(benzo[b]thiophen-3-yl)propanoic acid
  SITE 14: note = L-glutamic acid, useful for stapling/stapled with another amino acid residue comprising a side chain amino group to form a staple through the 4-carboxyl group
  SITE 15: note = C-term amino
XXXXEEXAFKXXXEA

SEQ ID NO: 453 - protein, 15 aa, synthetic construct
  SITE 1: note = N-term Acetic Acid
  SITE 1: note = (R)-2-allylpyrrolidine-2-carboxylic acid, useful for stapling/stapled with another amino acid residue comprising an olefin group to form a staple through the olefin group
  SITE 3: note = (S)-2-amino-4,4-dimethylpentanoic acid
  VARIANT 4: note = 2-amino-2-(pent-4-en-1-yl)hept-6-enoic acid, useful for stapling/stapled with another amino acid residue comprising an olefin group to form a staple through one of the two olefin groups and/or with another amino acid residue comprising an olefin group to form a staple through the other of the two olefin groups
  SITE 7: note = 2-amino-2-methylpropanoic acid
  SITE 10: note = L-lysine, useful for stapling/stapled with another amino acid residue comprising a side chain acid group to form a staple through the 6-amino group
  SITE 11: note (S)-3-amino-1-((pent-4-en-1-yloxy)carbonyl)pyrrolidine-3-ca rboxylic acid, useful for stapling/stapled with another amino acid residue comprising an olefin group to form a staple through the olefin group
  SITE 12: note = (S)-2-amino-3-(thiophen-3-yl)propanoic acid
  SITE 13: note = (S)-2-amino-3-(benzo[b]thiophen-3-yl)propanoic acid
  SITE 14: note = L-glutamic acid, useful for stapling/stapled with another amino acid residue comprising a side chain amino group to form a staple through the 4-carboxyl group
  SITE 15: note = C-term amino
XEXXEDXAFKXXXEA

SEQ ID NO: 454 - protein, 15 aa, synthetic construct
  SITE 1: note = N-term Acetic Acid
  SITE 1: note = (R)-2-allylpyrrolidine-2-carboxylic acid, useful for stapling/stapled with another amino acid residue comprising an olefin group to form a staple through the olefin group
  SITE 2: note = (S)-2-aminohexanedioic acid
  SITE 3: note = (S)-2-amino-4,4-dimethylpentanoic acid
  VARIANT 4: note = 2-amino-2-(pent-4-en-1-yl)hept-6-enoic acid, useful for stapling/stapled with another amino acid residue comprising an olefin group to form a staple through one of the two olefin groups and/or with another amino acid residue comprising an olefin group to form a staple through the other of the two olefin groups
  SITE 7: note = 2-amino-2-methylpropanoic acid
  SITE 10: note = L-lysine, useful for stapling/stapled with another amino acid residue comprising a side chain acid group to form a staple through the 6-amino group
  SITE 11: note (S)-3-amino-1-((pent-4-en-1-yloxy)carbonyl)pyrrolidine-3-ca rboxylic acid, useful for stapling/stapled with another amino acid residue comprising an olefin group to form a staple through the olefin group
  SITE 12: note = (S)-2-amino-3-(thiophen-3-yl)propanoic acid
  SITE 13: note = (S)-2-amino-3-(benzo[b]thiophen-3-yl)propanoic acid
  SITE 14: note = L-glutamic acid, useful for stapling/stapled with another amino acid residue comprising a side chain amino group to form a staple through the 4-carboxyl group
  SITE 15: note = C-term amino
XXXXEDXAFKXXXEA

SEQ ID NO: 455 - protein, 15 aa, synthetic construct
  SITE 1: note = N-term Acetic Acid
  SITE 1: note = (R)-2-allylpyrrolidine-2-carboxylic acid, useful for stapling/stapled with another amino acid residue comprising an olefin group to form a staple through the olefin group
  SITE 2: note = (S)-2-aminohexanedioic acid
  SITE 3: note = (S)-2-amino-4,4-dimethylpentanoic acid
  VARIANT 4: note = 2-amino-2-(pent-4-en-1-yl)hept-6-enoic acid, useful for stapling/stapled with another amino acid residue comprising an olefin group to form a staple through one of the two olefin groups and/or with another amino acid residue comprising an olefin group to form a staple through the other of the two olefin groups
  SITE 5: note = (S)-2-aminohexanedioic acid
  SITE 7: note = 2-amino-2-methylpropanoic acid
  SITE 10: note = L-lysine, useful for stapling/stapled with another amino acid residue comprising a side chain acid group to form a staple through the 6-amino group
  SITE 11: note (S)-3-amino-1-((pent-4-en-1-yloxy)carbonyl)pyrrolidine-3-ca rboxylic acid, useful for stapling/stapled with another amino acid residue comprising an olefin group to form a staple through the olefin group
  SITE 12: note = (S)-2-amino-3-(thiophen-3-yl)propanoic acid
  SITE 13: note = (S)-2-amino-3-(benzo[b]thiophen-3-yl)propanoic acid
  SITE 14: note = L-glutamic acid, useful for stapling/stapled with another amino acid residue comprising a side chain amino group to form a staple through the 4-carboxyl group
  SITE 15: note = C-term amino
XXXXXEXAFKXXXEA

SEQ ID NO: 456 - protein, 15 aa, synthetic construct
  SITE 1: note = N-term Acetic Acid
  SITE 1: note = (R)-2-allylpyrrolidine-2-carboxylic acid, useful for stapling/stapled with another amino acid residue comprising an olefin group to form a staple through the olefin group
  SITE 3: note = (S)-2-amino-4,4-dimethylpentanoic acid
  VARIANT 4: note = 2-amino-2-(pent-4-en-1-yl)hept-6-enoic acid, useful for stapling/stapled with another amino acid residue comprising an olefin group to form a staple through one of the two olefin groups and/or with another amino acid residue comprising an olefin group to form a staple through the other of the two olefin groups
  SITE 6: note = (S)-3-(2-amino-2-carboxyethyl)benzoic acid
  SITE 7: note = 2-amino-2-methylpropanoic acid
  SITE 10: note = D-lysine, useful for stapling/stapled with another amino acid residue comprising a side chain acid group to form a staple through the 6-amino group
  SITE 11: note (S)-3-amino-1-((pent-4-en-1-yloxy)carbonyl)pyrrolidine-3-ca rboxylic acid, useful for stapling/stapled with another amino acid residue comprising an olefin group to form a staple through the olefin group
  SITE 12: note = (S)-2-amino-3-(thiophen-3-yl)propanoic acid
  SITE 13: note = (S)-2-amino-3-(benzo[b]thiophen-3-yl)propanoic acid
  SITE 14: note = D-glutamic acid, useful for stapling/stapled with another amino acid residue comprising a side chain amino group to form a staple through the 4-carboxyl group
  SITE 15: note = C-term amino
XDXXDXXAFKXXXEA

SEQ ID NO: 457 - protein, 15 aa, synthetic construct
  SITE 1: note = N-term Acetic Acid
  SITE 1: note = (R)-2-allylpyrrolidine-2-carboxylic acid, useful for stapling/stapled with another amino acid residue comprising an olefin group to form a staple through the olefin group
  SITE 3: note = (S)-2-amino-4,4-dimethylpentanoic acid
  VARIANT 4: note = 2-amino-2-(pent-4-en-1-yl)hept-6-enoic acid, useful for stapling/stapled with another amino acid residue comprising an olefin group to form a staple through one of the two olefin groups and/or with another amino acid residue comprising an olefin group to form a staple through the other of the two olefin groups
  SITE 6: note = (S)-3-(2-amino-2-carboxyethyl)benzoic acid
  SITE 7: note = 2-amino-2-methylpropanoic acid
  SITE 10: note = (R)-2,5-diaminopentanoic acid, useful for stapling/stapled with another amino acid residue comprising a side chain acid group to form a staple through the 5-amino group
  SITE 11: note (S)-3-amino-1-((pent-4-en-1-yloxy)carbonyl)pyrrolidine-3-ca rboxylic acid, useful for stapling/stapled with another amino acid residue comprising an olefin group to form a staple through the olefin group
  SITE 12: note = (S)-2-amino-3-(thiophen-3-yl)propanoic acid
  SITE 13: note = (S)-2-amino-3-(benzo[b]thiophen-3-yl)propanoic acid
  SITE 14: note = L-glutamic acid, useful for stapling/stapled with another amino acid residue comprising a side chain amino group to form a staple through the 4-carboxyl group
  SITE 15: note = C-term amino
XDXXDXXAFXXXXEA

SEQ ID NO: 458 - protein, 15 aa, synthetic construct
  SITE 1: note = N-term Acetic Acid
  SITE 1: note = (R)-2-allylpyrrolidine-2-carboxylic acid, useful for stapling/stapled with another amino acid residue comprising an olefin group to form a staple through the olefin group
  SITE 3: note = (S)-2-amino-4,4-dimethylpentanoic acid
  VARIANT 4: note = 2-amino-2-(pent-4-en-1-yl)hept-6-enoic acid, useful for stapling/stapled with another amino acid residue comprising an olefin group to form a staple through one of the two olefin groups and/or with another amino acid residue comprising an olefin group to form a staple through the other of the two olefin groups
  SITE 6: note = (S)-3-(2-amino-2-carboxyethyl)benzoic acid
  SITE 7: note = 2-amino-2-methylpropanoic acid
  SITE 10: note = (R)-2,4-diaminobutanoic acid, useful for stapling/stapled with another amino acid residue comprising a side chain acid group to form a staple through the 4-amino group
  SITE 11: note (S)-3-amino-1-((pent-4-en-1-yloxy)carbonyl)pyrrolidine-3-ca rboxylic acid, useful for stapling/stapled with another amino acid residue comprising an olefin group to form a staple through the olefin group
  SITE 12: note = (S)-2-amino-3-(thiophen-3-yl)propanoic acid
  SITE 13: note = (S)-2-amino-3-(benzo[b]thiophen-3-yl)propanoic acid
  SITE 14: note = L-glutamic acid, useful for stapling/stapled with another amino acid residue comprising a side chain amino group to form a staple through the 4-carboxyl group
  SITE 15: note = C-term amino
XDXXDXXAFXXXXEA

SEQ ID NO: 459 - protein, 15 aa, synthetic construct
  SITE 1: note = N-term Acetic Acid
  SITE 1: note = (R)-2-allylpyrrolidine-2-carboxylic acid, useful for stapling/stapled with another amino acid residue comprising an olefin group to form a staple through the olefin group
  SITE 3: note = (S)-2-amino-4,4-dimethylpentanoic acid
  VARIANT 4: note = 2-amino-2-(pent-4-en-1-yl)hept-6-enoic acid, useful for stapling/stapled with another amino acid residue comprising an olefin group to form a staple through one of the two olefin groups and/or with another amino acid residue comprising an olefin group to form a staple through the other of the two olefin groups
  SITE 6: note = (S)-3-(2-amino-2-carboxyethyl)benzoic acid
  SITE 7: note = 2-amino-2-methylpropanoic acid
  SITE 10: note = (S)-2,5-diaminopentanoic acid, useful for stapling/stapled with another amino acid residue comprising a side chain acid group to form a staple through the 5-amino group
  SITE 11: note (S)-3-amino-1-((pent-4-en-1-yloxy)carbonyl)pyrrolidine-3-ca rboxylic acid, useful for stapling/stapled with another amino acid residue comprising an olefin group to form a staple through the olefin group
  SITE 12: note = (S)-2-amino-3-(thiophen-3-yl)propanoic acid
  SITE 13: note = (S)-2-amino-3-(benzo[b]thiophen-3-yl)propanoic acid
  SITE 14: note = (S)-2-aminohexanedioic acid, useful for stapling/stapled with another amino acid residue comprising a side chain amino group to form a staple through the 5-carboxyl group
  SITE 15: note = C-term amino
XDXXDXXAFXXXXXA

SEQ ID NO: 460 - protein, 15 aa, synthetic construct
  SITE 1: note = N-term Acetic Acid
  SITE 1: note = (R)-2-allylpyrrolidine-2-carboxylic acid, useful for stapling/stapled with another amino acid residue comprising an olefin group to form a staple through the olefin group
  SITE 3: note = (S)-2-amino-4,4-dimethylpentanoic acid
  VARIANT 4: note = 2-amino-2-(pent-4-en-1-yl)hept-6-enoic acid, useful for stapling/stapled with another amino acid residue comprising an olefin group to form a staple through one of the two olefin groups and/or with another amino acid residue comprising an olefin group to form a staple through the other of the two olefin groups
  SITE 6: note = (S)-3-(2-amino-2-carboxyethyl)benzoic acid
  SITE 7: note = 2-amino-2-methylpropanoic acid
  SITE 10: note = 2-amino-5-(methylamino)pentanoic acid, useful for stapling/stapled with another amino acid residue comprising a side chain acid group to form a staple through the amino group in the side chain
  SITE 11: note (S)-3-amino-1-((pent-4-en-1-yloxy)carbonyl)pyrrolidine-3-ca rboxylic acid, useful for stapling/stapled with another amino acid residue comprising an olefin group to form a staple through the olefin group
  SITE 12: note = (S)-2-amino-3-(thiophen-3-yl)propanoic acid
  SITE 13: note = (S)-2-amino-3-(benzo[b]thiophen-3-yl)propanoic acid
  SITE 14: note = (S)-2-aminohexanedioic acid, useful for stapling/stapled with another amino acid residue comprising a side chain amino group to form a staple through the 5-carboxyl group
  SITE 15: note = C-term amino
XDXXDXXAFXXXXXA

SEQ ID NO: 461 - protein, 15 aa, synthetic construct
  SITE 1: note = N-term pent-4-enoic acid, useful for stapling/stapled with another amino acid residue comprising an olefin group to form a staple through the olefin group
  SITE 1: note = (S)-2-methylpyrrolidine-2-carboxylic acid
  SITE 3: note = (S)-3-(allyl(benzyl)amino)-2-aminopropanoic acid, useful for stapling/stapled with another amino acid residue comprising an olefin group to form a staple through the olefin group
  SITE 4: note = (R)-2-amino-2-methylhept-6-enoic acid, useful for stapling/stapled with another amino acid residue comprising an olefin group to form a staple through the olefin group
  SITE 6: note = (S)-3-(2-amino-2-carboxyethyl)benzoic acid
  SITE 7: note = 2-amino-2-methylpropanoic acid
  SITE 10: note = L-lysine, useful for stapling/stapled with another amino acid residue comprising a side chain acid group to form a staple through the 6-amino group
  SITE 11: note (S)-3-amino-1-((pent-4-en-1-yloxy)carbonyl)pyrrolidine-3-ca rboxylic acid, useful for stapling/stapled with another amino acid residue comprising an olefin group to form a staple through the olefin group
  SITE 12: note = (S)-2-amino-3-(thiophen-3-yl)propanoic acid
  SITE 13: note = (S)-2-amino-3-(benzo[b]thiophen-3-yl)propanoic acid
  SITE 14: note = L-glutamic acid, useful for stapling/stapled with another amino acid residue comprising a side chain amino group to form a staple through the 4-carboxyl group
  SITE 15: note = C-term amino
XDXXDXXAFKXXXEA

SEQ ID NO: 462 - protein, 15 aa, synthetic construct
  SITE 1: note = N-term pent-4-enoic acid, useful for stapling/stapled with another amino acid residue comprising an olefin group to form a staple through the olefin group
  SITE 1: note = (S)-2-methylpyrrolidine-2-carboxylic acid
  SITE 3: note = (S)-3-(N-allylbenzamido)-2-aminopropanoic acid, useful for stapling/stapled with another amino acid residue comprising an olefin group to form a staple through the olefin group
  SITE 4: note = (R)-2-amino-2-methylhept-6-enoic acid, useful for stapling/stapled with another amino acid residue comprising an olefin group to form a staple through the olefin group
  SITE 6: note = (S)-3-(2-amino-2-carboxyethyl)benzoic acid
  SITE 7: note = 2-amino-2-methylpropanoic acid
  SITE 10: note = L-lysine, useful for stapling/stapled with another amino acid residue comprising a side chain acid group to form a staple through the 6-amino group
  SITE 11: note (S)-3-amino-1-((pent-4-en-1-yloxy)carbonyl)pyrrolidine-3-ca rboxylic acid, useful for stapling/stapled with another amino acid residue comprising an olefin group to form a staple through the olefin group
  SITE 12: note = (S)-2-amino-3-(thiophen-3-yl)propanoic acid
  SITE 13: note = (S)-2-amino-3-(benzo[b]thiophen-3-yl)propanoic acid
  SITE 14: note = L-glutamic acid, useful for stapling/stapled with another amino acid residue comprising a side chain amino group to form a staple through the 4-carboxyl group
  SITE 15: note = C-term amino
XDXXDXXAFKXXXEA

SEQ ID NO: 463 - protein, 15 aa, synthetic construct
  SITE 1: note = (S)-2-methylpyrrolidine-2-carboxylic acid
  SITE 3: note = (S)-3-(N-allylpivalamido)-2-aminopropanoic acid, useful for stapling/stapled with another amino acid residue comprising an olefin group to form a staple through the olefin group
  SITE 4: note = (R)-2-amino-2-methylhept-6-enoic acid, useful for stapling/stapled with another amino acid residue comprising an olefin group to form a staple through the olefin group
  SITE 6: note = (S)-3-(2-amino-2-carboxyethyl)benzoic acid
  SITE 7: note = 2-amino-2-methylpropanoic acid
  SITE 10: note = L-lysine, useful for stapling/stapled with another amino acid residue comprising a side chain acid group to form a staple through the 6-amino group
  SITE 11: note (S)-3-amino-1-((pent-4-en-1-yloxy)carbonyl)pyrrolidine-3-ca rboxylic acid, useful for stapling/stapled with another amino acid residue comprising an olefin group to form a staple through the olefin group
  SITE 12: note = (S)-2-amino-3-(thiophen-3-yl)propanoic acid
  SITE 13: note = (S)-2-amino-3-(benzo[b]thiophen-3-yl)propanoic acid
  SITE 14: note = L-glutamic acid, useful for stapling/stapled with another amino acid residue comprising a side chain amino group to form a staple through the 4-carboxyl group
  SITE 15: note = C-term amino
XDXXDXXAFKXXXEA

SEQ ID NO: 464 - protein, 15 aa, synthetic construct
  SITE 1: note = (S)-2-methylpyrrolidine-2-carboxylic acid
  SITE 3: note (S)-3-(N-allylcyclohexanecarboxamido)-2-aminopropanoic acid, useful for stapling/stapled with another amino acid residue comprising an olefin group to form a staple through the olefin group
  SITE 4: note = (R)-2-amino-2-methylhept-6-enoic acid, useful for stapling/stapled with another amino acid residue comprising an olefin group to form a staple through the olefin group
  SITE 6: note = (S)-3-(2-amino-2-carboxyethyl)benzoic acid
  SITE 7: note = 2-amino-2-methylpropanoic acid
  SITE 10: note = L-lysine, useful for stapling/stapled with another amino acid residue comprising a side chain acid group to form a staple through the 6-amino group
  SITE 11: note (S)-3-amino-1-((pent-4-en-1-yloxy)carbonyl)pyrrolidine-3-ca rboxylic acid, useful for stapling/stapled with another amino acid residue comprising an olefin group to form a staple through the olefin group
  SITE 12: note = (S)-2-amino-3-(thiophen-3-yl)propanoic acid
  SITE 13: note = (S)-2-amino-3-(benzo[b]thiophen-3-yl)propanoic acid
  SITE 14: note = L-glutamic acid, useful for stapling/stapled with another amino acid residue comprising a side chain amino group to form a staple through the 4-carboxyl group
  SITE 15: note = C-term amino
XDXXDXXAFKXXXEA

SEQ ID NO: 465 - protein, 15 aa, synthetic construct
  SITE 1: note = N-term Acetic Acid
  SITE 1: note = (R)-2-allylpyrrolidine-2-carboxylic acid, useful for stapling/stapled with another amino acid residue comprising an olefin group to form a staple through the olefin group
  SITE 3: note = (S)-2-amino-4,4-dimethylpentanoic acid
  VARIANT 4: note = 2-amino-2-(pent-4-en-1-yl)hept-6-enoic acid, useful for stapling/stapled with another amino acid residue comprising an olefin group to form a staple through one of the two olefin groups and/or with another amino acid residue comprising an olefin group to form a staple through the other of the two olefin groups
  SITE 6: note = (S)-3-(2-amino-2-carboxyethyl)benzoic acid
  SITE 7: note = 2-amino-2-methylpropanoic acid
  SITE 10: note = Cysteine, sulfur bonded to the methyl at position 2 of bis(methyl)naphthalene, useful for stapling/stapled with another thiol through the methyl at position 6 of bis(methyl)naphthalene
  SITE 11: note (S)-3-amino-1-((pent-4-en-1-yloxy)carbonyl)pyrrolidine-3-ca rboxylic acid, useful for stapling/stapled with another amino acid residue comprising an olefin group to form a staple through the olefin group
  SITE 12: note = (S)-2-amino-3-(thiophen-3-yl)propanoic acid
  SITE 13: note = (S)-2-amino-3-(benzo[b]thiophen-3-yl)propanoic acid
  SITE 15: note = C-term amino
XDXXDXXAFCXXXCA

SEQ ID NO: 466 - protein, 15 aa, synthetic construct
  SITE 1: note = N-term Acetic Acid
  SITE 1: note = (R)-2-allylpyrrolidine-2-carboxylic acid, useful for stapling/stapled with another amino acid residue comprising an olefin group to form a staple through the olefin group
  SITE 3: note = (S)-2-amino-4,4-dimethylpentanoic acid
  VARIANT 4: note = 2-amino-2-(pent-4-en-1-yl)hept-6-enoic acid, useful for stapling/stapled with another amino acid residue comprising an olefin group to form a staple through one of the two olefin groups and/or with another amino acid residue comprising an olefin group to form a staple through the other of the two olefin groups
  SITE 6: note = (S)-3-(2-amino-2-carboxyethyl)benzoic acid
  SITE 7: note = 2-amino-2-methylpropanoic acid
  SITE 10: note = Cysteine, sulfur bonded to the methyl at position 3 of bis(methyl)-1,1'-biphenyl, useful for stapling/stapled with another thiol through the methyl at position 3' of bis(methyl)-1,1'-biphenyl
  SITE 11: note (S)-3-amino-1-((pent-4-en-1-yloxy)carbonyl)pyrrolidine-3-ca rboxylic acid, useful for stapling/stapled with another amino acid residue comprising an olefin group to form a staple through the olefin group
  SITE 12: note = (S)-2-amino-3-(thiophen-3-yl)propanoic acid
  SITE 13: note = (S)-2-amino-3-(benzo[b]thiophen-3-yl)propanoic acid
  SITE 15: note = C-term amino
XDXXDXXAFCXXXCA

SEQ ID NO: 467 - protein, 15 aa, synthetic construct
  SITE 1: note = N-term Acetic Acid
  SITE 1: note = (R)-2-allylpyrrolidine-2-carboxylic acid, useful for stapling/stapled with another amino acid residue comprising an olefin group to form a staple through the olefin group
  SITE 3: note = (S)-2-amino-4,4-dimethylpentanoic acid
  VARIANT 4: note = 2-amino-2-(pent-4-en-1-yl)hept-6-enoic acid, useful for stapling/stapled with another amino acid residue comprising an olefin group to form a staple through one of the two olefin groups and/or with another amino acid residue comprising an olefin group to form a staple through the other of the two olefin groups
  SITE 6: note = (S)-3-(2-amino-2-carboxyethyl)benzoic acid
  SITE 7: note = 2-amino-2-methylpropanoic acid
  SITE 9: note = (S)-2-amino-3-(4-fluorophenyl)propanoic acid
  SITE 10: note = L-lysine, useful for stapling/stapled with another amino acid residue comprising a side chain acid group to form a staple through the 6-amino group
  SITE 11: note (S)-3-amino-1-((pent-4-en-1-yloxy)carbonyl)pyrrolidine-3-ca rboxylic acid, useful for stapling/stapled with another amino acid residue comprising an olefin group to form a staple through the olefin group
  SITE 12: note = (S)-2-amino-3-(thiophen-3-yl)propanoic acid
  SITE 13: note = (S)-2-amino-3-(benzo[b]thiophen-3-yl)propanoic acid
  SITE 14: note = L-glutamic acid, useful for stapling/stapled with another amino acid residue comprising a side chain amino group to form a staple through the 4-carboxyl group
  SITE 15: note = C-term amino
XDXXDXXAXKXXXEA

SEQ ID NO: 468 - protein, 15 aa, synthetic construct
  SITE 1: note = N-term Acetic Acid
  SITE 1: note = (R)-2-allylpyrrolidine-2-carboxylic acid, useful for stapling/stapled with another amino acid residue comprising an olefin group to form a staple through the olefin group
  SITE 3: note = (S)-2-amino-4,4-dimethylpentanoic acid
  VARIANT 4: note = 2-amino-2-(pent-4-en-1-yl)hept-6-enoic acid, useful for stapling/stapled with another amino acid residue comprising an olefin group to form a staple through one of the two olefin groups and/or with another amino acid residue comprising an olefin group to form a staple through the other of the two olefin groups
  SITE 6: note = (S)-3-(2-amino-2-carboxyethyl)benzoic acid
  SITE 7: note = 2-amino-2-methylpropanoic acid
  SITE 9: note = (S)-2-amino-3-(4-chlorophenyl)propanoic acid
  SITE 10: note = L-lysine, useful for stapling/stapled with another amino acid residue comprising a side chain acid group to form a staple through the 6-amino group
  SITE 11: note (S)-3-amino-1-((pent-4-en-1-yloxy)carbonyl)pyrrolidine-3-ca rboxylic acid, useful for stapling/stapled with another amino acid residue comprising an olefin group to form a staple through the olefin group
  SITE 12: note = (S)-2-amino-3-(thiophen-3-yl)propanoic acid
  SITE 13: note = (S)-2-amino-3-(benzo[b]thiophen-3-yl)propanoic acid
  SITE 14: note = L-glutamic acid, useful for stapling/stapled with another amino acid residue comprising a side chain amino group to form a staple through the 4-carboxyl group
  SITE 15: note = C-term amino
XDXXDXXAXKXXXEA

SEQ ID NO: 469 - protein, 15 aa, synthetic construct
  SITE 1: note = N-term Acetic Acid
  SITE 1: note = (R)-2-allylpyrrolidine-2-carboxylic acid, useful for stapling/stapled with another amino acid residue comprising an olefin group to form a staple through the olefin group
  SITE 3: note = (S)-2-amino-4,4-dimethylpentanoic acid
  VARIANT 4: note = 2-amino-2-(pent-4-en-1-yl)hept-6-enoic acid, useful for stapling/stapled with another amino acid residue comprising an olefin group to form a staple through one of the two olefin groups and/or with another amino acid residue comprising an olefin group to form a staple through the other of the two olefin groups
  SITE 6: note = (S)-3-(2-amino-2-carboxyethyl)benzoic acid
  SITE 7: note = 2-amino-2-methylpropanoic acid
  SITE 9: note = (S)-2-amino-3-(4-bromophenyl)propanoic acid
  SITE 10: note = L-lysine, useful for stapling/stapled with another amino acid residue comprising a side chain acid group to form a staple through the 6-amino group
  SITE 11: note (S)-3-amino-1-((pent-4-en-1-yloxy)carbonyl)pyrrolidine-3-ca rboxylic acid, useful for stapling/stapled with another amino acid residue comprising an olefin group to form a staple through the olefin group
  SITE 12: note = (S)-2-amino-3-(thiophen-3-yl)propanoic acid
  SITE 13: note = (S)-2-amino-3-(benzo[b]thiophen-3-yl)propanoic acid
  SITE 14: note = L-glutamic acid, useful for stapling/stapled with another amino acid residue comprising a side chain amino group to form a staple through the 4-carboxyl group
  SITE 15: note = C-term amino
XDXXDXXAXKXXXEA

SEQ ID NO: 470 - protein, 15 aa, synthetic construct
  SITE 1: note = N-term Acetic Acid
  SITE 1: note = (R)-2-allylpyrrolidine-2-carboxylic acid, useful for stapling/stapled with another amino acid residue comprising an olefin group to form a staple through the olefin group
  SITE 3: note = (S)-2-amino-4,4-dimethylpentanoic acid
  VARIANT 4: note = 2-amino-2-(pent-4-en-1-yl)hept-6-enoic acid, useful for stapling/stapled with another amino acid residue comprising an olefin group to form a staple through one of the two olefin groups and/or with another amino acid residue comprising an olefin group to form a staple through the other of the two olefin groups
  SITE 6: note = (S)-3-(2-amino-2-carboxyethyl)benzoic acid
  SITE 7: note = 2-amino-2-methylpropanoic acid
  SITE 9: note = (S)-2-amino-3-(3-fluorophenyl)propanoic acid
  SITE 10: note = L-lysine, useful for stapling/stapled with another amino acid residue comprising a side chain acid group to form a staple through the 6-amino group
  SITE 11: note (S)-3-amino-1-((pent-4-en-1-yloxy)carbonyl)pyrrolidine-3-ca rboxylic acid, useful for stapling/stapled with another amino acid residue comprising an olefin group to form a staple through the olefin group
  SITE 12: note = (S)-2-amino-3-(thiophen-3-yl)propanoic acid
  SITE 13: note = (S)-2-amino-3-(benzo[b]thiophen-3-yl)propanoic acid
  SITE 14: note = L-glutamic acid, useful for stapling/stapled with another amino acid residue comprising a side chain amino group to form a staple through the 4-carboxyl group
  SITE 15: note = C-term amino
XDXXDXXAXKXXXEA

SEQ ID NO: 471 - protein, 15 aa, synthetic construct
  SITE 1: note = N-term Acetic Acid
  SITE 1: note = (R)-2-allylpyrrolidine-2-carboxylic acid, useful for stapling/stapled with another amino acid residue comprising an olefin group to form a staple through the olefin group
  SITE 3: note = (S)-2-amino-4,4-dimethylpentanoic acid
  VARIANT 4: note = 2-amino-2-(pent-4-en-1-yl)hept-6-enoic acid, useful for stapling/stapled with another amino acid residue comprising an olefin group to form a staple through one of the two olefin groups and/or with another amino acid residue comprising an olefin group to form a staple through the other of the two olefin groups
  SITE 6: note = (S)-3-(2-amino-2-carboxyethyl)benzoic acid
  SITE 7: note = 2-amino-2-methylpropanoic acid
  SITE 9: note = (S)-2-amino-3-(3-chlorophenyl)propanoic acid
  SITE 10: note = L-lysine, useful for stapling/stapled with another amino acid residue comprising a side chain acid group to form a staple through the 6-amino group
  SITE 11: note (S)-3-amino-1-((pent-4-en-1-yloxy)carbonyl)pyrrolidine-3-ca rboxylic acid, useful for stapling/stapled with another amino acid residue comprising an olefin group to form a staple through the olefin group
  SITE 12: note = (S)-2-amino-3-(thiophen-3-yl)propanoic acid
  SITE 13: note = (S)-2-amino-3-(benzo[b]thiophen-3-yl)propanoic acid
  SITE 14: note = L-glutamic acid, useful for stapling/stapled with another amino acid residue comprising a side chain amino group to form a staple through the 4-carboxyl group
  SITE 15: note = C-term amino
XDXXDXXAXKXXXEA

SEQ ID NO: 472 - protein, 15 aa, synthetic construct
  SITE 1: note = N-term Acetic Acid
  SITE 1: note = (R)-2-allylpyrrolidine-2-carboxylic acid, useful for stapling/stapled with another amino acid residue comprising an olefin group to form a staple through the olefin group
  SITE 3: note = (S)-2-amino-4,4-dimethylpentanoic acid
  VARIANT 4: note = 2-amino-2-(pent-4-en-1-yl)hept-6-enoic acid, useful for stapling/stapled with another amino acid residue comprising an olefin group to form a staple through one of the two olefin groups and/or with another amino acid residue comprising an olefin group to form a staple through the other of the two olefin groups
  SITE 6: note = (S)-3-(2-amino-2-carboxyethyl)benzoic acid
  SITE 7: note = 2-amino-2-methylpropanoic acid
  SITE 9: note = (S)-2-amino-3-(3-bromophenyl)propanoic acid
  SITE 10: note = L-lysine, useful for stapling/stapled with another amino acid residue comprising a side chain acid group to form a staple through the 6-amino group
  SITE 11: note (S)-3-amino-1-((pent-4-en-1-yloxy)carbonyl)pyrrolidine-3-ca rboxylic acid, useful for stapling/stapled with another amino acid residue comprising an olefin group to form a staple through the olefin group
  SITE 12: note = (S)-2-amino-3-(thiophen-3-yl)propanoic acid
  SITE 13: note = (S)-2-amino-3-(benzo[b]thiophen-3-yl)propanoic acid
  SITE 14: note = L-glutamic acid, useful for stapling/stapled with another amino acid residue comprising a side chain amino group to form a staple through the 4-carboxyl group
  SITE 15: note = C-term amino
XDXXDXXAXKXXXEA

SEQ ID NO: 473 - protein, 15 aa, synthetic construct
  SITE 1: note = N-term Acetic Acid
  SITE 1: note = (R)-2-allylpyrrolidine-2-carboxylic acid, useful for stapling/stapled with another amino acid residue comprising an olefin group to form a staple through the olefin group
  SITE 3: note = (S)-2-amino-4,4-dimethylpentanoic acid
  VARIANT 4: note = 2-amino-2-(pent-4-en-1-yl)hept-6-enoic acid, useful for stapling/stapled with another amino acid residue comprising an olefin group to form a staple through one of the two olefin groups and/or with another amino acid residue comprising an olefin group to form a staple through the other of the two olefin groups
  SITE 6: note = (S)-3-(2-amino-2-carboxyethyl)benzoic acid
  SITE 7: note = 2-amino-2-methylpropanoic acid
  SITE 9: note = (S)-2-amino-3-(2-fluorophenyl)propanoic acid
  SITE 10: note = L-lysine, useful for stapling/stapled with another amino acid residue comprising a side chain acid group to form a staple through the 6-amino group
  SITE 11: note (S)-3-amino-1-((pent-4-en-1-yloxy)carbonyl)pyrrolidine-3-ca rboxylic acid, useful for stapling/stapled with another amino acid residue comprising an olefin group to form a staple through the olefin group
  SITE 12: note = (S)-2-amino-3-(thiophen-3-yl)propanoic acid
  SITE 13: note = (S)-2-amino-3-(benzo[b]thiophen-3-yl)propanoic acid
  SITE 14: note = L-glutamic acid, useful for stapling/stapled with another amino acid residue comprising a side chain amino group to form a staple through the 4-carboxyl group
  SITE 15: note = C-term amino
XDXXDXXAXKXXXEA

SEQ ID NO: 474 - protein, 15 aa, synthetic construct
  SITE 1: note = N-term Acetic Acid
  SITE 1: note = (R)-2-allylpyrrolidine-2-carboxylic acid, useful for stapling/stapled with another amino acid residue comprising an olefin group to form a staple through the olefin group
  SITE 3: note = (S)-2-amino-4,4-dimethylpentanoic acid
  VARIANT 4: note = 2-amino-2-(pent-4-en-1-yl)hept-6-enoic acid, useful for stapling/stapled with another amino acid residue comprising an olefin group to form a staple through one of the two olefin groups and/or with another amino acid residue comprising an olefin group to form a staple through the other of the two olefin groups
  SITE 6: note = (S)-3-(2-amino-2-carboxyethyl)benzoic acid
  SITE 7: note = 2-amino-2-methylpropanoic acid
  SITE 9: note = (S)-2-amino-3-(3-methoxyphenyl)propanoic acid
  SITE 10: note = L-lysine, useful for stapling/stapled with another amino acid residue comprising a side chain acid group to form a staple through the 6-amino group
  SITE 11: note (S)-3-amino-1-((pent-4-en-1-yloxy)carbonyl)pyrrolidine-3-ca rboxylic acid, useful for stapling/stapled with another amino acid residue comprising an olefin group to form a staple through the olefin group
  SITE 12: note = (S)-2-amino-3-(thiophen-3-yl)propanoic acid
  SITE 13: note = (S)-2-amino-3-(benzo[b]thiophen-3-yl)propanoic acid
  SITE 14: note = L-glutamic acid, useful for stapling/stapled with another amino acid residue comprising a side chain amino group to form a staple through the 4-carboxyl group
  SITE 15: note = C-term amino
XDXXDXXAXKXXXEA

SEQ ID NO: 475 - protein, 15 aa, synthetic construct
  SITE 1: note = N-term Acetic Acid
  SITE 1: note = (R)-2-allylpyrrolidine-2-carboxylic acid, useful for stapling/stapled with another amino acid residue comprising an olefin group to form a staple through the olefin group
  SITE 3: note = (S)-2-amino-4,4-dimethylpentanoic acid
  VARIANT 4: note = 2-amino-2-(pent-4-en-1-yl)hept-6-enoic acid, useful for stapling/stapled with another amino acid residue comprising an olefin group to form a staple through one of the two olefin groups and/or with another amino acid residue comprising an olefin group to form a staple through the other of the two olefin groups
  SITE 6: note = (S)-3-(2-amino-2-carboxyethyl)benzoic acid
  SITE 7: note = 2-amino-2-methylpropanoic acid
  SITE 9: note = (S)-2-amino-3-(4-cyanophenyl)propanoic acid
  SITE 10: note = L-lysine, useful for stapling/stapled with another amino acid residue comprising a side chain acid group to form a staple through the 6-amino group
  SITE 11: note (S)-3-amino-1-((pent-4-en-1-yloxy)carbonyl)pyrrolidine-3-ca rboxylic acid, useful for stapling/stapled with another amino acid residue comprising an olefin group to form a staple through the olefin group
  SITE 12: note = (S)-2-amino-3-(thiophen-3-yl)propanoic acid
  SITE 13: note = (S)-2-amino-3-(benzo[b]thiophen-3-yl)propanoic acid
  SITE 14: note = L-glutamic acid, useful for stapling/stapled with another amino acid residue comprising a side chain amino group to form a staple through the 4-carboxyl group
  SITE 15: note = C-term amino
XDXXDXXAXKXXXEA

SEQ ID NO: 476 - protein, 15 aa, synthetic construct
  SITE 1: note = N-term Acetic Acid
  SITE 1: note = (R)-2-allylpyrrolidine-2-carboxylic acid, useful for stapling/stapled with another amino acid residue comprising an olefin group to form a staple through the olefin group
  SITE 3: note = (S)-2-amino-4,4-dimethylpentanoic acid
  VARIANT 4: note = 2-amino-2-(pent-4-en-1-yl)hept-6-enoic acid, useful for stapling/stapled with another amino acid residue comprising an olefin group to form a staple through one of the two olefin groups and/or with another amino acid residue comprising an olefin group to form a staple through the other of the two olefin groups
  SITE 6: note = (S)-3-(2-amino-2-carboxyethyl)benzoic acid
  SITE 7: note = 2-amino-2-methylpropanoic acid
  SITE 9: note = (S)-2-amino-3-(3-cyanophenyl)propanoic acid
  SITE 10: note = L-lysine, useful for stapling/stapled with another amino acid residue comprising a side chain acid group to form a staple through the 6-amino group
  SITE 11: note (S)-3-amino-1-((pent-4-en-1-yloxy)carbonyl)pyrrolidine-3-ca rboxylic acid, useful for stapling/stapled with another amino acid residue comprising an olefin group to form a staple through the olefin group
  SITE 12: note = (S)-2-amino-3-(thiophen-3-yl)propanoic acid
  SITE 13: note = (S)-2-amino-3-(benzo[b]thiophen-3-yl)propanoic acid
  SITE 14: note = L-glutamic acid, useful for stapling/stapled with another amino acid residue comprising a side chain amino group to form a staple through the 4-carboxyl group
  SITE 15: note = C-term amino
XDXXDXXAXKXXXEA

SEQ ID NO: 477 - protein, 15 aa, synthetic construct
  SITE 1: note = N-term Acetic Acid
  SITE 1: note = (R)-2-allylpyrrolidine-2-carboxylic acid, useful for stapling/stapled with another amino acid residue comprising an olefin group to form a staple through the olefin group
  SITE 3: note = (S)-2-amino-4,4-dimethylpentanoic acid
  VARIANT 4: note = 2-amino-2-(pent-4-en-1-yl)hept-6-enoic acid, useful for stapling/stapled with another amino acid residue comprising an olefin group to form a staple through one of the two olefin groups and/or with another amino acid residue comprising an olefin group to form a staple through the other of the two olefin groups
  SITE 6: note = (S)-3-(2-amino-2-carboxyethyl)benzoic acid
  SITE 7: note = 2-amino-2-methylpropanoic acid
  SITE 9: note = (S)-2-amino-3-(p-tolyl)propanoic acid
  SITE 10: note = L-lysine, useful for stapling/stapled with another amino acid residue comprising a side chain acid group to form a staple through the 6-amino group
  SITE 11: note (S)-3-amino-1-((pent-4-en-1-yloxy)carbonyl)pyrrolidine-3-ca rboxylic acid, useful for stapling/stapled with another amino acid residue comprising an olefin group to form a staple through the olefin group
  SITE 12: note = (S)-2-amino-3-(thiophen-3-yl)propanoic acid
  SITE 13: note = (S)-2-amino-3-(benzo[b]thiophen-3-yl)propanoic acid
  SITE 14: note = L-glutamic acid, useful for stapling/stapled with another amino acid residue comprising a side chain amino group to form a staple through the 4-carboxyl group
  SITE 15: note = C-term amino
XDXXDXXAXKXXXEA

SEQ ID NO: 478 - protein, 15 aa, synthetic construct
  SITE 1: note = N-term Acetic Acid
  SITE 1: note = (R)-2-allylpyrrolidine-2-carboxylic acid, useful for stapling/stapled with another amino acid residue comprising an olefin group to form a staple through the olefin group
  SITE 3: note = (S)-2-amino-4,4-dimethylpentanoic acid
  VARIANT 4: note = 2-amino-2-(pent-4-en-1-yl)hept-6-enoic acid, useful for stapling/stapled with another amino acid residue comprising an olefin group to form a staple through one of the two olefin groups and/or with another amino acid residue comprising an olefin group to form a staple through the other of the two olefin groups
  SITE 6: note = (S)-3-(2-amino-2-carboxyethyl)benzoic acid
  SITE 7: note = 2-amino-2-methylpropanoic acid
  SITE 9: note = (S)-2-amino-3-(m-tolyl)propanoic acid
  SITE 10: note = L-lysine, useful for stapling/stapled with another amino acid residue comprising a side chain acid group to form a staple through the 6-amino group
  SITE 11: note (S)-3-amino-1-((pent-4-en-1-yloxy)carbonyl)pyrrolidine-3-ca rboxylic acid, useful for stapling/stapled with another amino acid residue comprising an olefin group to form a staple through the olefin group
  SITE 12: note = (S)-2-amino-3-(thiophen-3-yl)propanoic acid
  SITE 13: note = (S)-2-amino-3-(benzo[b]thiophen-3-yl)propanoic acid
  SITE 14: note = L-glutamic acid, useful for stapling/stapled with another amino acid residue comprising a side chain amino group to form a staple through the 4-carboxyl group
  SITE 15: note = C-term amino
XDXXDXXAXKXXXEA

SEQ ID NO: 479 - protein, 15 aa, synthetic construct
  SITE 1: note = N-term Acetic Acid
  SITE 1: note = (R)-2-allylpyrrolidine-2-carboxylic acid, useful for stapling/stapled with another amino acid residue comprising an olefin group to form a staple through the olefin group
  SITE 3: note = (S)-2-amino-4,4-dimethylpentanoic acid
  VARIANT 4: note = 2-amino-2-(pent-4-en-1-yl)hept-6-enoic acid, useful for stapling/stapled with another amino acid residue comprising an olefin group to form a staple through one of the two olefin groups and/or with another amino acid residue comprising an olefin group to form a staple through the other of the two olefin groups
  SITE 6: note = (S)-3-(2-amino-2-carboxyethyl)benzoic acid
  SITE 7: note = 2-amino-2-methylpropanoic acid
  SITE 9: note = 2-amino-2,3-dihydro-1H-indene-2-carboxylic acid
  SITE 10: note = L-lysine, useful for stapling/stapled with another amino acid residue comprising a side chain acid group to form a staple through the 6-amino group
  SITE 11: note (S)-3-amino-1-((pent-4-en-1-yloxy)carbonyl)pyrrolidine-3-ca rboxylic acid, useful for stapling/stapled with another amino acid residue comprising an olefin group to form a staple through the olefin group
  SITE 12: note = (S)-2-amino-3-(thiophen-3-yl)propanoic acid
  SITE 13: note = (S)-2-amino-3-(benzo[b]thiophen-3-yl)propanoic acid
  SITE 14: note = L-glutamic acid, useful for stapling/stapled with another amino acid residue comprising a side chain amino group to form a staple through the 4-carboxyl group
  SITE 15: note = C-term amino
XDXXDXXAXKXXXEA

SEQ ID NO: 480 - protein, 15 aa, synthetic construct
  SITE 1: note = N-term Acetic Acid
  SITE 1: note = (R)-2-allylpyrrolidine-2-carboxylic acid, useful for stapling/stapled with another amino acid residue comprising an olefin group to form a staple through the olefin group
  SITE 3: note = (S)-2-amino-4,4-dimethylpentanoic acid
  VARIANT 4: note = 2-amino-2-(pent-4-en-1-yl)hept-6-enoic acid, useful for stapling/stapled with another amino acid residue comprising an olefin group to form a staple through one of the two olefin groups and/or with another amino acid residue comprising an olefin group to form a staple through the other of the two olefin groups
  SITE 6: note = (S)-3-(2-amino-2-carboxyethyl)benzoic acid
  SITE 7: note = 2-amino-2-methylpropanoic acid
  SITE 9: note = (2S,3R)-2-amino-4-methyl-3-phenylpentanoic acid
  SITE 10: note = L-lysine, useful for stapling/stapled with another amino acid residue comprising a side chain acid group to form a staple through the 6-amino group
  SITE 11: note (S)-3-amino-1-((pent-4-en-1-yloxy)carbonyl)pyrrolidine-3-ca rboxylic acid, useful for stapling/stapled with another amino acid residue comprising an olefin group to form a staple through the olefin group
  SITE 12: note = (S)-2-amino-3-(thiophen-3-yl)propanoic acid
  SITE 13: note = (S)-2-amino-3-(benzo[b]thiophen-3-yl)propanoic acid
  SITE 14: note = L-glutamic acid, useful for stapling/stapled with another amino acid residue comprising a side chain amino group to form a staple through the 4-carboxyl group
  SITE 15: note = C-term amino
XDXXDXXAXKXXXEA

SEQ ID NO: 481 - protein, 15 aa, synthetic construct
  SITE 1: note = N-term Acetic Acid
  SITE 1: note = (R)-2-allylpyrrolidine-2-carboxylic acid, useful for stapling/stapled with another amino acid residue comprising an olefin group to form a staple through the olefin group
  SITE 3: note = (S)-2-amino-4,4-dimethylpentanoic acid
  VARIANT 4: note = 2-amino-2-(pent-4-en-1-yl)hept-6-enoic acid, useful for stapling/stapled with another amino acid residue comprising an olefin group to form a staple through one of the two olefin groups and/or with another amino acid residue comprising an olefin group to form a staple through the other of the two olefin groups
  SITE 6: note = (S)-3-(2-amino-2-carboxyethyl)benzoic acid
  SITE 7: note = 2-amino-2-methylpropanoic acid
  SITE 9: note = (2S,3S)-2-amino-4-methyl-3-phenylpentanoic acid
  SITE 10: note = L-lysine, useful for stapling/stapled with another amino acid residue comprising a side chain acid group to form a staple through the 6-amino group
  SITE 11: note (S)-3-amino-1-((pent-4-en-1-yloxy)carbonyl)pyrrolidine-3-ca rboxylic acid, useful for stapling/stapled with another amino acid residue comprising an olefin group to form a staple through the olefin group
  SITE 12: note = (S)-2-amino-3-(thiophen-3-yl)propanoic acid
  SITE 13: note = (S)-2-amino-3-(benzo[b]thiophen-3-yl)propanoic acid
  SITE 14: note = L-glutamic acid, useful for stapling/stapled with another amino acid residue comprising a side chain amino group to form a staple through the 4-carboxyl group
  SITE 15: note = C-term amino
XDXXDXXAXKXXXEA

SEQ ID NO: 482 - protein, 15 aa, synthetic construct
  SITE 1: note = N-term Acetic Acid
  SITE 1: note = (R)-2-allylpyrrolidine-2-carboxylic acid, useful for stapling/stapled with another amino acid residue comprising an olefin group to form a staple through the olefin group
  SITE 3: note = (S)-2-amino-4,4-dimethylpentanoic acid
  VARIANT 4: note = 2-amino-2-(pent-4-en-1-yl)hept-6-enoic acid, useful for stapling/stapled with another amino acid residue comprising an olefin group to form a staple through one of the two olefin groups and/or with another amino acid residue comprising an olefin group to form a staple through the other of the two olefin groups
  SITE 6: note = (S)-3-(2-amino-2-carboxyethyl)benzoic acid
  SITE 7: note = 2-amino-2-methylpropanoic acid
  SITE 9: note = (2R,3R)-2-amino-4-methyl-3-phenylpentanoic acid
  SITE 10: note = L-lysine, useful for stapling/stapled with another amino acid residue comprising a side chain acid group to form a staple through the 6-amino group
  SITE 11: note (S)-3-amino-1-((pent-4-en-1-yloxy)carbonyl)pyrrolidine-3-ca rboxylic acid, useful for stapling/stapled with another amino acid residue comprising an olefin group to form a staple through the olefin group
  SITE 12: note = (S)-2-amino-3-(thiophen-3-yl)propanoic acid
  SITE 13: note = (S)-2-amino-3-(benzo[b]thiophen-3-yl)propanoic acid
  SITE 14: note = L-glutamic acid, useful for stapling/stapled with another amino acid residue comprising a side chain amino group to form a staple through the 4-carboxyl group
  SITE 15: note = C-term amino
XDXXDXXAXKXXXEA

SEQ ID NO: 483 - protein, 15 aa, synthetic construct
  SITE 1: note = N-term Acetic Acid
  SITE 1: note = (R)-2-allylpyrrolidine-2-carboxylic acid, useful for stapling/stapled with another amino acid residue comprising an olefin group to form a staple through the olefin group
  SITE 3: note = (S)-2-amino-4,4-dimethylpentanoic acid
  VARIANT 4: note = 2-amino-2-(pent-4-en-1-yl)hept-6-enoic acid, useful for stapling/stapled with another amino acid residue comprising an olefin group to form a staple through one of the two olefin groups and/or with another amino acid residue comprising an olefin group to form a staple through the other of the two olefin groups
  SITE 6: note = (S)-3-(2-amino-2-carboxyethyl)benzoic acid
  SITE 7: note = 2-amino-2-methylpropanoic acid
  SITE 9: note = (2S,3R)-2-amino-3-(2,6-dimethylphenyl)butanoic acid
  SITE 10: note = L-lysine, useful for stapling/stapled with another amino acid residue comprising a side chain acid group to form a staple through the 6-amino group
  SITE 11: note (S)-3-amino-1-((pent-4-en-1-yloxy)carbonyl)pyrrolidine-3-ca rboxylic acid, useful for stapling/stapled with another amino acid residue comprising an olefin group to form a staple through the olefin group
  SITE 12: note = (S)-2-amino-3-(thiophen-3-yl)propanoic acid
  SITE 13: note = (S)-2-amino-3-(benzo[b]thiophen-3-yl)propanoic acid
  SITE 14: note = L-glutamic acid, useful for stapling/stapled with another amino acid residue comprising a side chain amino group to form a staple through the 4-carboxyl group
  SITE 15: note = C-term amino
XDXXDXXAXKXXXEA

SEQ ID NO: 484 - protein, 15 aa, synthetic construct
  SITE 1: note = N-term Acetic Acid
  SITE 1: note = (R)-2-allylpyrrolidine-2-carboxylic acid, useful for stapling/stapled with another amino acid residue comprising an olefin group to form a staple through the olefin group
  SITE 3: note = (S)-2-amino-4,4-dimethylpentanoic acid
  VARIANT 4: note = 2-amino-2-(pent-4-en-1-yl)hept-6-enoic acid, useful for stapling/stapled with another amino acid residue comprising an olefin group to form a staple through one of the two olefin groups and/or with another amino acid residue comprising an olefin group to form a staple through the other of the two olefin groups
  SITE 6: note = (S)-3-(2-amino-2-carboxyethyl)benzoic acid
  SITE 7: note = 2-amino-2-methylpropanoic acid
  SITE 9: note = (2R,3R)-2-amino-3-(2,6-dimethylphenyl)butanoic acid
  SITE 10: note = L-lysine, useful for stapling/stapled with another amino acid residue comprising a side chain acid group to form a staple through the 6-amino group
  SITE 11: note (S)-3-amino-1-((pent-4-en-1-yloxy)carbonyl)pyrrolidine-3-ca rboxylic acid, useful for stapling/stapled with another amino acid residue comprising an olefin group to form a staple through the olefin group
  SITE 12: note = (S)-2-amino-3-(thiophen-3-yl)propanoic acid
  SITE 13: note = (S)-2-amino-3-(benzo[b]thiophen-3-yl)propanoic acid
  SITE 14: note = L-glutamic acid, useful for stapling/stapled with another amino acid residue comprising a side chain amino group to form a staple through the 4-carboxyl group
  SITE 15: note = C-term amino
XDXXDXXAXKXXXEA

SEQ ID NO: 485 - protein, 15 aa, synthetic construct
  SITE 1: note = N-term Acetic Acid
  SITE 1: note = (R)-2-allylpyrrolidine-2-carboxylic acid, useful for stapling/stapled with another amino acid residue comprising an olefin group to form a staple through the olefin group
  SITE 3: note = (S)-2-amino-4,4-dimethylpentanoic acid
  VARIANT 4: note = 2-amino-2-(pent-4-en-1-yl)hept-6-enoic acid, useful for stapling/stapled with another amino acid residue comprising an olefin group to form a staple through one of the two olefin groups and/or with another amino acid residue comprising an olefin group to form a staple through the other of the two olefin groups
  SITE 6: note = (S)-3-(2-amino-2-carboxyethyl)benzoic acid
  SITE 7: note = 2-amino-2-methylpropanoic acid
  SITE 9: note = (2S,3S)-2-amino-3-(2,6-dimethylphenyl)butanoic acid
  SITE 10: note = L-lysine, useful for stapling/stapled with another amino acid residue comprising a side chain acid group to form a staple through the 6-amino group
  SITE 11: note (S)-3-amino-1-((pent-4-en-1-yloxy)carbonyl)pyrrolidine-3-ca rboxylic acid, useful for stapling/stapled with another amino acid residue comprising an olefin group to form a staple through the olefin group
  SITE 12: note = (S)-2-amino-3-(thiophen-3-yl)propanoic acid
  SITE 13: note = (S)-2-amino-3-(benzo[b]thiophen-3-yl)propanoic acid
  SITE 14: note = L-glutamic acid, useful for stapling/stapled with another amino acid residue comprising a side chain amino group to form a staple through the 4-carboxyl group
  SITE 15: note = C-term amino
XDXXDXXAXKXXXEA

SEQ ID NO: 486 - protein, 15 aa, synthetic construct
  SITE 1: note = N-term Acetic Acid
  SITE 1: note = (R)-2-allylpyrrolidine-2-carboxylic acid, useful for stapling/stapled with another amino acid residue comprising an olefin group to form a staple through the olefin group
  SITE 3: note = (S)-2-amino-4,4-dimethylpentanoic acid
  VARIANT 4: note = 2-amino-2-(pent-4-en-1-yl)hept-6-enoic acid, useful for stapling/stapled with another amino acid residue comprising an olefin group to form a staple through one of the two olefin groups and/or with another amino acid residue comprising an olefin group to form a staple through the other of the two olefin groups
  SITE 6: note = (S)-3-(2-amino-2-carboxyethyl)benzoic acid
  SITE 7: note = 2-amino-2-methylpropanoic acid
  SITE 9: note = (2R,3S)-2-amino-3-(2,6-dimethylphenyl)butanoic acid
  SITE 10: note = L-lysine, useful for stapling/stapled with another amino acid residue comprising a side chain acid group to form a staple through the 6-amino group
  SITE 11: note (S)-3-amino-1-((pent-4-en-1-yloxy)carbonyl)pyrrolidine-3-ca rboxylic acid, useful for stapling/stapled with another amino acid residue comprising an olefin group to form a staple through the olefin group
  SITE 12: note = (S)-2-amino-3-(thiophen-3-yl)propanoic acid
  SITE 13: note = (S)-2-amino-3-(benzo[b]thiophen-3-yl)propanoic acid
  SITE 14: note = L-glutamic acid, useful for stapling/stapled with another amino acid residue comprising a side chain amino group to form a staple through the 4-carboxyl group
  SITE 15: note = C-term amino
XDXXDXXAXKXXXEA

SEQ ID NO: 487 - protein, 15 aa, synthetic construct
  SITE 1: note = N-term Acetic Acid
  SITE 1: note = (R)-2-allylpyrrolidine-2-carboxylic acid, useful for stapling/stapled with another amino acid residue comprising an olefin group to form a staple through the olefin group
  SITE 3: note = (S)-2-amino-4,4-dimethylpentanoic acid
  VARIANT 4: note = 2-amino-2-(pent-4-en-1-yl)hept-6-enoic acid, useful for stapling/stapled with another amino acid residue comprising an olefin group to form a staple through one of the two olefin groups and/or with another amino acid residue comprising an olefin group to form a staple through the other of the two olefin groups
  SITE 6: note = (S)-3-(2-amino-2-carboxyethyl)benzoic acid
  SITE 7: note = 2-amino-2-methylpropanoic acid
  SITE 10: note = L-lysine, useful for stapling/stapled with another amino acid residue comprising a side chain acid group to form a staple through the 6-amino group
  SITE 11: note (S)-3-amino-1-((pent-4-en-1-yloxy)carbonyl)pyrrolidine-3-ca rboxylic acid, useful for stapling/stapled with another amino acid residue comprising an olefin group to form a staple through the olefin group
  SITE 12: note = (S)-2-amino-3-(thiophen-3-yl)propanoic acid
  SITE 13: note = (S)-2-amino-3-(benzo[b]thiophen-3-yl)propanoic acid
  SITE 14: note = L-glutamic acid, useful for stapling/stapled with another amino acid residue comprising a side chain amino group to form a staple through the 4-carboxyl group
  SITE 15: note = N6-diazo-L-lysine
  SITE 15: note = C-term amino
XEXXEXXAFKXXXEK

SEQ ID NO: 488 - protein, 15 aa, synthetic construct
  SITE 1: note = N-term Acetic Acid
  SITE 1: note = (R)-2-allylpyrrolidine-2-carboxylic acid, useful for stapling/stapled with another amino acid residue comprising an olefin group to form a staple through the olefin group
  SITE 3: note = (S)-2-amino-4,4-dimethylpentanoic acid
  VARIANT 4: note = 2-amino-2-(pent-4-en-1-yl)hept-6-enoic acid, useful for stapling/stapled with another amino acid residue comprising an olefin group to form a staple through one of the two olefin groups and/or with another amino acid residue comprising an olefin group to form a staple through the other of the two olefin groups
  SITE 6: note = (S)-3-(2-amino-2-carboxyethyl)benzoic acid
  SITE 7: note = 2-amino-2-methylpropanoic acid
  SITE 10: note = L-lysine, useful for stapling/stapled with another amino acid residue comprising a side chain acid group to form a staple through the 6-amino group
  SITE 11: note (S)-3-amino-1-((pent-4-en-1-yloxy)carbonyl)pyrrolidine-3-ca rboxylic acid, useful for stapling/stapled with another amino acid residue comprising an olefin group to form a staple through the olefin group
  SITE 12: note = (S)-2-amino-3-(thiophen-3-yl)propanoic acid
  SITE 13: note = (S)-2-amino-3-(benzo[b]thiophen-3-yl)propanoic acid
  SITE 14: note = L-glutamic acid, useful for stapling/stapled with another amino acid residue comprising a side chain amino group to form a staple through the 4-carboxyl group
  SITE 15: note = N6-diazo-L-lysine
  SITE 15: note = C-term amino
XDXXDXXAFKXXXEK

SEQ ID NO: 489 - protein, 14 aa, synthetic construct
  SITE 1: note = N-term Acetic Acid
  SITE 1: note = (R)-2-allylpyrrolidine-2-carboxylic acid, useful for stapling/stapled with another amino acid residue comprising an olefin group to form a staple through the olefin group
  VARIANT 4: note = 2-amino-2-(pent-4-en-1-yl)hept-6-enoic acid, useful for stapling/stapled with another amino acid residue comprising an olefin group to form a staple through one of the two olefin groups and/or with another amino acid residue comprising an olefin group to form a staple through the other of the two olefin groups
  SITE 7: note = D-lysine, useful for stapling/stapled with another amino acid residue comprising a side chain acid group to form a staple through the 6-amino group
  SITE 10: note = L-glutamic acid, useful for stapling/stapled with another amino acid residue comprising a side chain amino group to form a staple through the 4-carboxyl group
  SITE 11: note (S)-3-amino-1-((pent-4-en-1-yloxy)carbonyl)pyrrolidine-3-ca rboxylic acid, useful for stapling/stapled with another amino acid residue comprising an olefin group to form a staple through the olefin group
  SITE 12: note = (S)-2-amino-3-(thiophen-3-yl)propanoic acid
  SITE 13: note = (S)-2-amino-3-(benzo[b]thiophen-3-yl)propanoic acid
  SITE 14: note = C-term amino
XDLXDDKAFEXXXQ

SEQ ID NO: 490 - protein, 14 aa, synthetic construct
  SITE 1: note = N-term Acetic Acid
  SITE 1: note = (R)-2-allylpyrrolidine-2-carboxylic acid, useful for stapling/stapled with another amino acid residue comprising an olefin group to form a staple through the olefin group
  VARIANT 4: note = 2-amino-2-(pent-4-en-1-yl)hept-6-enoic acid, useful for stapling/stapled with another amino acid residue comprising an olefin group to form a staple through one of the two olefin groups and/or with another amino acid residue comprising an olefin group to form a staple through the other of the two olefin groups
  SITE 7: note = D-glutamic acid, useful for stapling/stapled with another amino acid residue comprising a side chain amino group to form a staple through the 4-carboxyl group
  SITE 10: note = L-lysine, useful for stapling/stapled with another amino acid residue comprising a side chain acid group to form a staple through the 6-amino group
  SITE 11: note (S)-3-amino-1-((pent-4-en-1-yloxy)carbonyl)pyrrolidine-3-ca rboxylic acid, useful for stapling/stapled with another amino acid residue comprising an olefin group to form a staple through the olefin group
  SITE 12: note = (S)-2-amino-3-(thiophen-3-yl)propanoic acid
  SITE 13: note = (S)-2-amino-3-(benzo[b]thiophen-3-yl)propanoic acid
  SITE 14: note = C-term amino
XDLXDDEAFKXXXQ

SEQ ID NO: 491 - protein, 14 aa, synthetic construct
  SITE 1: note = N-term Acetic Acid
  SITE 1: note = (R)-2-allylpyrrolidine-2-carboxylic acid, useful for stapling/stapled with another amino acid residue comprising an olefin group to form a staple through the olefin group
  SITE 3: note = (S)-2-amino-4,4-dimethylpentanoic acid
  VARIANT 4: note = 2-amino-2-(pent-4-en-1-yl)hept-6-enoic acid, useful for stapling/stapled with another amino acid residue comprising an olefin group to form a staple through one of the two olefin groups and/or with another amino acid residue comprising an olefin group to form a staple through the other of the two olefin groups
  SITE 6: note = (S)-3-(2-amino-2-carboxyethyl)benzoic acid
  SITE 7: note = N5-(2-aminoethyl)-L-glutamine, useful for stapling/stapled with another amino acid residue comprising a side chain acid group to form a staple through the amino group in the side chain
  SITE 11: note (S)-3-amino-1-((pent-4-en-1-yloxy)carbonyl)pyrrolidine-3-ca rboxylic acid, useful for stapling/stapled with another amino acid residue comprising an olefin group to form a staple through the olefin group
  SITE 12: note = (S)-2-amino-3-(2-(trifluoromethyl)phenyl)propanoic acid
  SITE 13: note = (S)-2-amino-3-(benzo[b]thiophen-3-yl)propanoic acid
  SITE 14: note = L-glutamic acid, useful for stapling/stapled with another amino acid residue comprising a side chain amino group to form a staple through the acid group in the side chain
  SITE 14: note = C-term amino
XDXXDXQAFLXXXE

SEQ ID NO: 492 - protein, 14 aa, synthetic construct
  SITE 1: note = N-term Acetic Acid
  SITE 1: note = (R)-2-allylpyrrolidine-2-carboxylic acid, useful for stapling/stapled with another amino acid residue comprising an olefin group to form a staple through the olefin group
  SITE 3: note = (S)-2-amino-4,4-dimethylpentanoic acid
  VARIANT 4: note = 2-amino-2-(pent-4-en-1-yl)hept-6-enoic acid, useful for stapling/stapled with another amino acid residue comprising an olefin group to form a staple through one of the two olefin groups and/or with another amino acid residue comprising an olefin group to form a staple through the other of the two olefin groups
  SITE 6: note = (S)-3-(2-amino-2-carboxyethyl)benzoic acid
  SITE 7: note = N5-methyl-N5-(2-(methylamino)ethyl)-L-glutamine, useful for stapling/stapled with another amino acid residue comprising a side chain acid group to form a staple through the amino group in the side chain
  SITE 11: note (S)-3-amino-1-((pent-4-en-1-yloxy)carbonyl)pyrrolidine-3-ca rboxylic acid, useful for stapling/stapled with another amino acid residue comprising an olefin group to form a staple through the olefin group
  SITE 12: note = (S)-2-amino-3-(2-(trifluoromethyl)phenyl)propanoic acid
  SITE 13: note = (S)-2-amino-3-(benzo[b]thiophen-3-yl)propanoic acid
  SITE 14: note = L-glutamic acid, useful for stapling/stapled with another amino acid residue comprising a side chain amino group to form a staple through the acid group in the side chain
  SITE 14: note = C-term amino
XDXXDXQAFLXXXE

SEQ ID NO: 493 - protein, 14 aa, synthetic construct
  SITE 1: note = N-term Acetic Acid
  SITE 1: note = (R)-2-allylpyrrolidine-2-carboxylic acid, useful for stapling/stapled with another amino acid residue comprising an olefin group to form a staple through the olefin group
  SITE 3: note = (S)-2-amino-4,4-dimethylpentanoic acid
  VARIANT 4: note = 2-amino-2-(pent-4-en-1-yl)hept-6-enoic acid, useful for stapling/stapled with another amino acid residue comprising an olefin group to form a staple through one of the two olefin groups and/or with another amino acid residue comprising an olefin group to form a staple through the other of the two olefin groups
  SITE 6: note = (S)-3-(2-amino-2-carboxyethyl)benzoic acid
  SITE 7: note = N5-(3-aminopropyl)-L-glutamine, useful for stapling/stapled with another amino acid residue comprising a side chain acid group to form a staple through the amino group in the side chain
  SITE 11: note (S)-3-amino-1-((pent-4-en-1-yloxy)carbonyl)pyrrolidine-3-ca rboxylic acid, useful for stapling/stapled with another amino acid residue comprising an olefin group to form a staple through the olefin group
  SITE 12: note = (S)-2-amino-3-(2-(trifluoromethyl)phenyl)propanoic acid
  SITE 13: note = (S)-2-amino-3-(benzo[b]thiophen-3-yl)propanoic acid
  SITE 14: note = L-glutamic acid, useful for stapling/stapled with another amino acid residue comprising a side chain amino group to form a staple through the acid group in the side chain
  SITE 14: note = C-term amino
XDXXDXQAFLXXXE

SEQ ID NO: 494 - protein, 14 aa, synthetic construct
  SITE 1: note = N-term Acetic Acid
  SITE 1: note = (R)-2-allylpyrrolidine-2-carboxylic acid, useful for stapling/stapled with another amino acid residue comprising an olefin group to form a staple through the olefin group
  SITE 3: note = (S)-2-amino-4,4-dimethylpentanoic acid
  VARIANT 4: note = 2-amino-2-(pent-4-en-1-yl)hept-6-enoic acid, useful for stapling/stapled with another amino acid residue comprising an olefin group to form a staple through one of the two olefin groups and/or with another amino acid residue comprising an olefin group to form a staple through the other of the two olefin groups
  SITE 6: note = (S)-3-(2-amino-2-carboxyethyl)benzoic acid
  SITE 7: note = N5-(5-aminopentyl)-L-glutamine, useful for stapling/stapled with another amino acid residue comprising a side chain acid group to form a staple through the amino group in the side chain
  SITE 11: note (S)-3-amino-1-((pent-4-en-1-yloxy)carbonyl)pyrrolidine-3-ca rboxylic acid, useful for stapling/stapled with another amino acid residue comprising an olefin group to form a staple through the olefin group
  SITE 12: note = (S)-2-amino-3-(2-(trifluoromethyl)phenyl)propanoic acid
  SITE 13: note = (S)-2-amino-3-(benzo[b]thiophen-3-yl)propanoic acid
  SITE 14: note = L-glutamic acid, useful for stapling/stapled with another amino acid residue comprising a side chain amino group to form a staple through the acid group in the side chain
  SITE 14: note = C-term amino
XDXXDXQAFLXXXE

SEQ ID NO: 495 - protein, 14 aa, synthetic construct
  SITE 1: note = N-term Acetic Acid
  SITE 1: note = (R)-2-allylpyrrolidine-2-carboxylic acid, useful for stapling/stapled with another amino acid residue comprising an olefin group to form a staple through the olefin group
  SITE 3: note = (S)-2-amino-4,4-dimethylpentanoic acid
  VARIANT 4: note = 2-amino-2-(pent-4-en-1-yl)hept-6-enoic acid, useful for stapling/stapled with another amino acid residue comprising an olefin group to form a staple through one of the two olefin groups and/or with another amino acid residue comprising an olefin group to form a staple through the other of the two olefin groups
  SITE 6: note = (S)-3-(2-amino-2-carboxyethyl)benzoic acid
  SITE 7: note = N5-methyl-N5-(6-(methylamino)hexyl)-L-glutamine, useful for stapling/stapled with another amino acid residue comprising a side chain acid group to form a staple through the amino group in the side chain
  SITE 11: note (S)-3-amino-1-((pent-4-en-1-yloxy)carbonyl)pyrrolidine-3-ca rboxylic acid, useful for stapling/stapled with another amino acid residue comprising an olefin group to form a staple through the olefin group
  SITE 12: note = (S)-2-amino-3-(2-(trifluoromethyl)phenyl)propanoic acid
  SITE 13: note = (S)-2-amino-3-(benzo[b]thiophen-3-yl)propanoic acid
  SITE 14: note = L-glutamic acid, useful for stapling/stapled with another amino acid residue comprising a side chain amino group to form a staple through the acid group in the side chain
  SITE 14: note = C-term amino
XDXXDXQAFLXXXE

SEQ ID NO: 496 - protein, 15 aa, synthetic construct
  SITE 1: note = N-term Acetic Acid
  SITE 1: note = (R)-2-allylpyrrolidine-2-carboxylic acid, useful for stapling/stapled with another amino acid residue comprising an olefin group to form a staple through the olefin group
  SITE 3: note = (S)-2-amino-4,4-dimethylpentanoic acid
  VARIANT 4: note = 2-amino-2-(pent-4-en-1-yl)hept-6-enoic acid, useful for stapling/stapled with another amino acid residue comprising an olefin group to form a staple through one of the two olefin groups and/or with another amino acid residue comprising an olefin group to form a staple through the other of the two olefin groups
  SITE 6: note = (S)-3-(2-amino-2-carboxyethyl)benzoic acid
  SITE 7: note = 2-amino-2-methylpropanoic acid
  SITE 10: note = N6-methyl-L-lysine, useful for stapling/stapled with another amino acid residue comprising a side chain acid group to form a staple through the side chain amino group
  SITE 11: note (S)-3-amino-1-((pent-4-en-1-yloxy)carbonyl)pyrrolidine-3-ca rboxylic acid, useful for stapling/stapled with another amino acid residue comprising an olefin group to form a staple through the olefin group
  SITE 12: note = (S)-2-amino-3-(thiophen-3-yl)propanoic acid
  SITE 13: note = (S)-2-amino-3-(benzo[b]thiophen-3-yl)propanoic acid
  SITE 14: note = (S)-2-aminohexanedioic acid, useful for stapling/stapled with another amino acid residue comprising a side chain amino group to form a staple through the 5-carboxyl group
  SITE 15: note = C-term amino
XDXXDXXAFKXXXXA

SEQ ID NO: 497 - protein, 15 aa, synthetic construct
  SITE 1: note = N-term Acetic Acid
  SITE 1: note = (R)-2-allylpyrrolidine-2-carboxylic acid, useful for stapling/stapled with another amino acid residue comprising an olefin group to form a staple through the olefin group
  SITE 3: note = (S)-2-amino-4,4-dimethylpentanoic acid
  VARIANT 4: note = 2-amino-2-(pent-4-en-1-yl)hept-6-enoic acid, useful for stapling/stapled with another amino acid residue comprising an olefin group to form a staple through one of the two olefin groups and/or with another amino acid residue comprising an olefin group to form a staple through the other of the two olefin groups
  SITE 6: note = (S)-3-(2-amino-2-carboxyethyl)benzoic acid
  SITE 7: note = 2-amino-2-methylpropanoic acid
  SITE 10: note = N6-methyl-L-lysine, useful for stapling/stapled with another amino acid residue comprising a side chain acid group to form a staple through the side chain amino group
  SITE 11: note (S)-3-amino-1-((pent-4-en-1-yloxy)carbonyl)pyrrolidine-3-ca rboxylic acid, useful for stapling/stapled with another amino acid residue comprising an olefin group to form a staple through the olefin group
  SITE 12: note = (S)-2-amino-3-(thiophen-3-yl)propanoic acid
  SITE 13: note = (S)-2-amino-3-(benzo[b]thiophen-3-yl)propanoic acid
  SITE 14: note = L-glutamic acid, useful for stapling/stapled with another amino acid residue comprising a side chain amino group to form a staple through the 4-carboxyl group
  SITE 15: note = C-term amino
XDXXDXXAFKXXXEA

SEQ ID NO: 498 - protein, 14 aa, synthetic construct
  SITE 1: note = N-term Acetic Acid
  SITE 1: note = (R)-2-allylpyrrolidine-2-carboxylic acid, useful for stapling/stapled with another amino acid residue comprising an olefin group to form a staple through the olefin group
  SITE 3: note = (S)-2-amino-4,4-dimethylpentanoic acid
  VARIANT 4: note = 2-amino-2-(pent-4-en-1-yl)hept-6-enoic acid, useful for stapling/stapled with another amino acid residue comprising an olefin group to form a staple through one of the two olefin groups and/or with another amino acid residue comprising an olefin group to form a staple through the other of the two olefin groups
  SITE 6: note = (S)-3-(2-amino-2-carboxyethyl)benzoic acid
  SITE 7: note = 2-amino-2-methylpropanoic acid
  SITE 10: note = L-lysine, useful for stapling/stapled with another amino acid residue comprising a side chain acid group to form a staple through the 6-amino group
  SITE 11: note (S)-3-amino-1-((pent-4-en-1-yloxy)carbonyl)pyrrolidine-3-ca rboxylic acid, useful for stapling/stapled with another amino acid residue comprising an olefin group to form a staple through the olefin group
  SITE 12: note = (S)-2-amino-3-(thiophen-3-yl)propanoic acid
  SITE 13: note = (S)-2-amino-3-(benzo[b]thiophen-3-yl)propanoic acid
  SITE 14: note = L-glutamic acid, useful for stapling/stapled with another amino acid residue comprising a side chain amino group to form a staple through the 4-carboxyl group
  SITE 14: note = C-term amino
XDXXDXXAFKXXXE

SEQ ID NO: 499 - protein, 15 aa, synthetic construct
  SITE 1: note = N-term Acetic Acid
  SITE 1: note = (R)-2-allylpyrrolidine-2-carboxylic acid, useful for stapling/stapled with another amino acid residue comprising an olefin group to form a staple through the olefin group
  SITE 3: note = (S)-2-amino-4,4-dimethylpentanoic acid
  VARIANT 4: note = 2-amino-2-(pent-4-en-1-yl)hept-6-enoic acid, useful for stapling/stapled with another amino acid residue comprising an olefin group to form a staple through one of the two olefin groups and/or with another amino acid residue comprising an olefin group to form a staple through the other of the two olefin groups
  SITE 6: note = (S)-3-(2-amino-2-carboxyethyl)benzoic acid
  SITE 7: note = 2-amino-2-methylpropanoic acid
  SITE 10: note = L-lysine, useful for stapling/stapled with another amino acid residue comprising a side chain acid group to form a staple through the 6-amino group
  SITE 11: note (S)-3-amino-1-((pent-4-en-1-yloxy)carbonyl)pyrrolidine-3-ca rboxylic acid, useful for stapling/stapled with another amino acid residue comprising an olefin group to form a staple through the olefin group
  SITE 12: note = (S)-2-amino-3-(thiophen-3-yl)propanoic acid
  SITE 13: note = (S)-2-amino-3-(benzo[b]thiophen-3-yl)propanoic acid
  SITE 14: note = L-glutamic acid, useful for stapling/stapled with another amino acid residue comprising a side chain amino group to form a staple through the 4-carboxyl group
  SITE 15: note = C-term amino
XDXXDXXAFKXXXEG

SEQ ID NO: 500 - protein, 15 aa, synthetic construct
  SITE 1: note = N-term Acetic Acid
  SITE 1: note = (R)-2-allylpyrrolidine-2-carboxylic acid, useful for stapling/stapled with another amino acid residue comprising an olefin group to form a staple through the olefin group
  SITE 3: note = (S)-2-amino-4,4-dimethylpentanoic acid
  VARIANT 4: note = 2-amino-2-(pent-4-en-1-yl)hept-6-enoic acid, useful for stapling/stapled with another amino acid residue comprising an olefin group to form a staple through one of the two olefin groups and/or with another amino acid residue comprising an olefin group to form a staple through the other of the two olefin groups
  SITE 6: note = (S)-3-(2-amino-2-carboxyethyl)benzoic acid
  SITE 7: note = 2-amino-2-methylpropanoic acid
  SITE 10: note = L-lysine, useful for stapling/stapled with another amino acid residue comprising a side chain acid group to form a staple through the 6-amino group
  SITE 11: note (S)-3-amino-1-((pent-4-en-1-yloxy)carbonyl)pyrrolidine-3-ca rboxylic acid, useful for stapling/stapled with another amino acid residue comprising an olefin group to form a staple through the olefin group
  SITE 12: note = (S)-2-amino-3-(thiophen-3-yl)propanoic acid
  SITE 13: note = (S)-2-amino-3-(benzo[b]thiophen-3-yl)propanoic acid
  SITE 14: note = L-glutamic acid, useful for stapling/stapled with another amino acid residue comprising a side chain amino group to form a staple through the 4-carboxyl group
  SITE 15: note = C-term amino
XDXXDXXAFKXXXEL

SEQ ID NO: 501 - protein, 15 aa, synthetic construct
  SITE 1: note = N-term Acetic Acid
  SITE 1: note = (R)-2-allylpyrrolidine-2-carboxylic acid, useful for stapling/stapled with another amino acid residue comprising an olefin group to form a staple through the olefin group
  SITE 3: note = (S)-2-amino-4,4-dimethylpentanoic acid
  VARIANT 4: note = 2-amino-2-(pent-4-en-1-yl)hept-6-enoic acid, useful for stapling/stapled with another amino acid residue comprising an olefin group to form a staple through one of the two olefin groups and/or with another amino acid residue comprising an olefin group to form a staple through the other of the two olefin groups
  SITE 6: note = (S)-3-(2-amino-2-carboxyethyl)benzoic acid
  SITE 7: note = 2-amino-2-methylpropanoic acid
  SITE 10: note = L-lysine, useful for stapling/stapled with another amino acid residue comprising a side chain acid group to form a staple through the 6-amino group
  SITE 11: note (S)-3-amino-1-((pent-4-en-1-yloxy)carbonyl)pyrrolidine-3-ca rboxylic acid, useful for stapling/stapled with another amino acid residue comprising an olefin group to form a staple through the olefin group
  SITE 12: note = (S)-2-amino-3-(thiophen-3-yl)propanoic acid
  SITE 13: note = (S)-2-amino-3-(benzo[b]thiophen-3-yl)propanoic acid
  SITE 14: note = L-glutamic acid, useful for stapling/stapled with another amino acid residue comprising a side chain amino group to form a staple through the 4-carboxyl group
  SITE 15: note = (S)-2-amino-4,4-dimethylpentanoic acid
  SITE 15: note = C-term amino
XDXXDXXAFKXXXEX

SEQ ID NO: 502 - protein, 15 aa, synthetic construct
  SITE 1: note = N-term Acetic Acid
  SITE 1: note = (R)-2-allylpyrrolidine-2-carboxylic acid, useful for stapling/stapled with another amino acid residue comprising an olefin group to form a staple through the olefin group
  SITE 3: note = (S)-2-amino-4,4-dimethylpentanoic acid
  VARIANT 4: note = 2-amino-2-(pent-4-en-1-yl)hept-6-enoic acid, useful for stapling/stapled with another amino acid residue comprising an olefin group to form a staple through one of the two olefin groups and/or with another amino acid residue comprising an olefin group to form a staple through the other of the two olefin groups
  SITE 6: note = (S)-3-(2-amino-2-carboxyethyl)benzoic acid
  SITE 7: note = 2-amino-2-methylpropanoic acid
  SITE 10: note = L-lysine, useful for stapling/stapled with another amino acid residue comprising a side chain acid group to form a staple through the 6-amino group
  SITE 11: note (S)-3-amino-1-((pent-4-en-1-yloxy)carbonyl)pyrrolidine-3-ca rboxylic acid, useful for stapling/stapled with another amino acid residue comprising an olefin group to form a staple through the olefin group
  SITE 12: note = (S)-2-amino-3-(thiophen-3-yl)propanoic acid
  SITE 13: note = (S)-2-amino-3-(benzo[b]thiophen-3-yl)propanoic acid
  SITE 14: note = L-glutamic acid, useful for stapling/stapled with another amino acid residue comprising a side chain amino group to form a staple through the 4-carboxyl group
  SITE 15: note = C-term amino
XDXXDXXAFKXXXEP

SEQ ID NO: 503 - protein, 15 aa, synthetic construct
  SITE 1: note = N-term Acetic Acid
  SITE 1: note = (R)-2-allylpyrrolidine-2-carboxylic acid, useful for stapling/stapled with another amino acid residue comprising an olefin group to form a staple through the olefin group
  SITE 3: note = (S)-2-amino-4,4-dimethylpentanoic acid
  VARIANT 4: note = 2-amino-2-(pent-4-en-1-yl)hept-6-enoic acid, useful for stapling/stapled with another amino acid residue comprising an olefin group to form a staple through one of the two olefin groups and/or with another amino acid residue comprising an olefin group to form a staple through the other of the two olefin groups
  SITE 6: note = (S)-3-(2-amino-2-carboxyethyl)benzoic acid
  SITE 7: note = 2-amino-2-methylpropanoic acid
  SITE 10: note = L-lysine, useful for stapling/stapled with another amino acid residue comprising a side chain acid group to form a staple through the 6-amino group
  SITE 11: note (S)-3-amino-1-((pent-4-en-1-yloxy)carbonyl)pyrrolidine-3-ca rboxylic acid, useful for stapling/stapled with another amino acid residue comprising an olefin group to form a staple through the olefin group
  SITE 12: note = (S)-2-amino-3-(thiophen-3-yl)propanoic acid
  SITE 13: note = (S)-2-amino-3-(benzo[b]thiophen-3-yl)propanoic acid
  SITE 14: note = L-glutamic acid, useful for stapling/stapled with another amino acid residue comprising a side chain amino group to form a staple through the 4-carboxyl group
  SITE 15: note = D-proline
  SITE 15: note = C-term amino
XDXXDXXAFKXXXEP

SEQ ID NO: 504 - protein, 15 aa, synthetic construct
  SITE 1: note = N-term Acetic Acid
  SITE 1: note = (R)-2-allylpyrrolidine-2-carboxylic acid, useful for stapling/stapled with another amino acid residue comprising an olefin group to form a staple through the olefin group
  SITE 3: note = (S)-2-amino-4,4-dimethylpentanoic acid
  VARIANT 4: note = 2-amino-2-(pent-4-en-1-yl)hept-6-enoic acid, useful for stapling/stapled with another amino acid residue comprising an olefin group to form a staple through one of the two olefin groups and/or with another amino acid residue comprising an olefin group to form a staple through the other of the two olefin groups
  SITE 6: note = (S)-3-(2-amino-2-carboxyethyl)benzoic acid
  SITE 7: note = 2-amino-2-methylpropanoic acid
  SITE 10: note = L-lysine, useful for stapling/stapled with another amino acid residue comprising a side chain acid group to form a staple through the 6-amino group
  SITE 11: note (S)-3-amino-1-((pent-4-en-1-yloxy)carbonyl)pyrrolidine-3-ca rboxylic acid, useful for stapling/stapled with another amino acid residue comprising an olefin group to form a staple through the olefin group
  SITE 12: note = (S)-2-amino-3-(thiophen-3-yl)propanoic acid
  SITE 13: note = (S)-2-amino-3-(benzo[b]thiophen-3-yl)propanoic acid
  SITE 14: note = L-glutamic acid, useful for stapling/stapled with another amino acid residue comprising a side chain amino group to form a staple through the 4-carboxyl group
  SITE 15: note = C-term amino
XDXXDXXAFKXXXES

SEQ ID NO: 505 - protein, 15 aa, synthetic construct
  SITE 1: note = N-term Acetic Acid
  SITE 1: note = (R)-2-allylpyrrolidine-2-carboxylic acid, useful for stapling/stapled with another amino acid residue comprising an olefin group to form a staple through the olefin group
  SITE 3: note = (S)-2-amino-4,4-dimethylpentanoic acid
  VARIANT 4: note = 2-amino-2-(pent-4-en-1-yl)hept-6-enoic acid, useful for stapling/stapled with another amino acid residue comprising an olefin group to form a staple through one of the two olefin groups and/or with another amino acid residue comprising an olefin group to form a staple through the other of the two olefin groups
  SITE 6: note = (S)-3-(2-amino-2-carboxyethyl)benzoic acid
  SITE 7: note = 2-amino-2-methylpropanoic acid
  SITE 10: note = L-lysine, useful for stapling/stapled with another amino acid residue comprising a side chain acid group to form a staple through the 6-amino group
  SITE 11: note (S)-3-amino-1-((pent-4-en-1-yloxy)carbonyl)pyrrolidine-3-ca rboxylic acid, useful for stapling/stapled with another amino acid residue comprising an olefin group to form a staple through the olefin group
  SITE 12: note = (S)-2-amino-3-(thiophen-3-yl)propanoic acid
  SITE 13: note = (S)-2-amino-3-(benzo[b]thiophen-3-yl)propanoic acid
  SITE 14: note = L-glutamic acid, useful for stapling/stapled with another amino acid residue comprising a side chain amino group to form a staple through the 4-carboxyl group
  SITE 15: note = C-term amino
XDXXDXXAFKXXXEF

SEQ ID NO: 506 - protein, 15 aa, synthetic construct
  SITE 1: note = N-term Acetic Acid
  SITE 1: note = (R)-2-allylpyrrolidine-2-carboxylic acid, useful for stapling/stapled with another amino acid residue comprising an olefin group to form a staple through the olefin group
  SITE 3: note = (S)-2-amino-4,4-dimethylpentanoic acid
  VARIANT 4: note = 2-amino-2-(pent-4-en-1-yl)hept-6-enoic acid, useful for stapling/stapled with another amino acid residue comprising an olefin group to form a staple through one of the two olefin groups and/or with another amino acid residue comprising an olefin group to form a staple through the other of the two olefin groups
  SITE 6: note = (S)-3-(2-amino-2-carboxyethyl)benzoic acid
  SITE 7: note = 2-amino-2-methylpropanoic acid
  SITE 10: note = L-lysine, useful for stapling/stapled with another amino acid residue comprising a side chain acid group to form a staple through the 6-amino group
  SITE 11: note (S)-3-amino-1-((pent-4-en-1-yloxy)carbonyl)pyrrolidine-3-ca rboxylic acid, useful for stapling/stapled with another amino acid residue comprising an olefin group to form a staple through the olefin group
  SITE 12: note = (S)-2-amino-3-(thiophen-3-yl)propanoic acid
  SITE 13: note = (S)-2-amino-3-(benzo[b]thiophen-3-yl)propanoic acid
  SITE 14: note = L-glutamic acid, useful for stapling/stapled with another amino acid residue comprising a side chain amino group to form a staple through the 4-carboxyl group
  SITE 15: note = C-term amino
XDXXDXXAFKXXXEN

SEQ ID NO: 507 - protein, 15 aa, synthetic construct
  SITE 1: note = N-term Acetic Acid
  SITE 1: note = (R)-2-allylpyrrolidine-2-carboxylic acid, useful for stapling/stapled with another amino acid residue comprising an olefin group to form a staple through the olefin group
  SITE 3: note = (S)-2-amino-4,4-dimethylpentanoic acid
  VARIANT 4: note = 2-amino-2-(pent-4-en-1-yl)hept-6-enoic acid, useful for stapling/stapled with another amino acid residue comprising an olefin group to form a staple through one of the two olefin groups and/or with another amino acid residue comprising an olefin group to form a staple through the other of the two olefin groups
  SITE 6: note = (S)-3-(2-amino-2-carboxyethyl)benzoic acid
  SITE 7: note = 2-amino-2-methylpropanoic acid
  SITE 10: note = L-lysine, useful for stapling/stapled with another amino acid residue comprising a side chain acid group to form a staple through the 6-amino group
  SITE 11: note (S)-3-amino-1-((pent-4-en-1-yloxy)carbonyl)pyrrolidine-3-ca rboxylic acid, useful for stapling/stapled with another amino acid residue comprising an olefin group to form a staple through the olefin group
  SITE 12: note = (S)-2-amino-3-(thiophen-3-yl)propanoic acid
  SITE 13: note = (S)-2-amino-3-(benzo[b]thiophen-3-yl)propanoic acid
  SITE 14: note = L-glutamic acid, useful for stapling/stapled with another amino acid residue comprising a side chain amino group to form a staple through the 4-carboxyl group
  SITE 15: note = C-term amino
XDXXDXXAFKXXXEQ

SEQ ID NO: 508 - protein, 15 aa, synthetic construct
  SITE 1: note = N-term Acetic Acid
  SITE 1: note = (R)-2-allylpyrrolidine-2-carboxylic acid, useful for stapling/stapled with another amino acid residue comprising an olefin group to form a staple through the olefin group
  SITE 3: note = (S)-2-amino-4,4-dimethylpentanoic acid
  VARIANT 4: note = 2-amino-2-(pent-4-en-1-yl)hept-6-enoic acid, useful for stapling/stapled with another amino acid residue comprising an olefin group to form a staple through one of the two olefin groups and/or with another amino acid residue comprising an olefin group to form a staple through the other of the two olefin groups
  SITE 6: note = (S)-3-(2-amino-2-carboxyethyl)benzoic acid
  SITE 7: note = 2-amino-2-methylpropanoic acid
  SITE 10: note = L-lysine, useful for stapling/stapled with another amino acid residue comprising a side chain acid group to form a staple through the 6-amino group
  SITE 11: note (S)-3-amino-1-((pent-4-en-1-yloxy)carbonyl)pyrrolidine-3-ca rboxylic acid, useful for stapling/stapled with another amino acid residue comprising an olefin group to form a staple through the olefin group
  SITE 12: note = (S)-2-amino-3-(thiophen-3-yl)propanoic acid
  SITE 13: note = (S)-2-amino-3-(benzo[b]thiophen-3-yl)propanoic acid
  SITE 14: note = L-glutamic acid, useful for stapling/stapled with another amino acid residue comprising a side chain amino group to form a staple through the 4-carboxyl group
  SITE 15: note = C-term amino
XDXXDXXAFKXXXEW

SEQ ID NO: 509 - protein, 15 aa, synthetic construct
  SITE 1: note = N-term Acetic Acid
  SITE 1: note = (R)-2-allylpyrrolidine-2-carboxylic acid, useful for stapling/stapled with another amino acid residue comprising an olefin group to form a staple through the olefin group
  SITE 3: note = (S)-2-amino-4,4-dimethylpentanoic acid
  VARIANT 4: note = 2-amino-2-(pent-4-en-1-yl)hept-6-enoic acid, useful for stapling/stapled with another amino acid residue comprising an olefin group to form a staple through one of the two olefin groups and/or with another amino acid residue comprising an olefin group to form a staple through the other of the two olefin groups
  SITE 6: note = (S)-3-(2-amino-2-carboxyethyl)benzoic acid
  SITE 7: note = 2-amino-2-methylpropanoic acid
  SITE 10: note = L-lysine, useful for stapling/stapled with another amino acid residue comprising a side chain acid group to form a staple through the 6-amino group
  SITE 11: note (S)-3-amino-1-((pent-4-en-1-yloxy)carbonyl)pyrrolidine-3-ca rboxylic acid, useful for stapling/stapled with another amino acid residue comprising an olefin group to form a staple through the olefin group
  SITE 12: note = (S)-2-amino-3-(thiophen-3-yl)propanoic acid
  SITE 13: note = (S)-2-amino-3-(benzo[b]thiophen-3-yl)propanoic acid
  SITE 14: note = L-glutamic acid, useful for stapling/stapled with another amino acid residue comprising a side chain amino group to form a staple through the 4-carboxyl group
  SITE 15: note = C-term amino
XDXXDXXAFKXXXEY

SEQ ID NO: 510 - protein, 15 aa, synthetic construct
  SITE 1: note = N-term Acetic Acid
  SITE 1: note = (R)-2-allylpyrrolidine-2-carboxylic acid, useful for stapling/stapled with another amino acid residue comprising an olefin group to form a staple through the olefin group
  VARIANT 4: note = 2-amino-2-(pent-4-en-1-yl)hept-6-enoic acid, useful for stapling/stapled with another amino acid residue comprising an olefin group to form a staple through one of the two olefin groups and/or with another amino acid residue comprising an olefin group to form a staple through the other of the two olefin groups
  SITE 6: note = (S)-3-(2-amino-2-carboxyethyl)benzoic acid
  SITE 10: note = L-lysine, useful for stapling/stapled with another amino acid residue comprising a side chain acid group to form a staple through the 6-amino group
  SITE 11: note (S)-3-amino-1-((pent-4-en-1-yloxy)carbonyl)pyrrolidine-3-ca rboxylic acid, useful for stapling/stapled with another amino acid residue comprising an olefin group to form a staple through the olefin group
  SITE 12: note = (S)-2-amino-3-(thiophen-3-yl)propanoic acid
  SITE 13: note = (S)-2-amino-3-(benzo[b]thiophen-3-yl)propanoic acid
  SITE 14: note = L-glutamic acid, useful for stapling/stapled with another amino acid residue comprising a side chain amino group to form a staple through the 4-carboxyl group
  SITE 15: note = C-term amino
XDIXDXFAFKXXXEA

SEQ ID NO: 511 - protein, 15 aa, synthetic construct
  SITE 1: note = N-term Acetic Acid
  SITE 1: note = (R)-2-allylpyrrolidine-2-carboxylic acid, useful for stapling/stapled with another amino acid residue comprising an olefin group to form a staple through the olefin group
  VARIANT 4: note = 2-amino-2-(pent-4-en-1-yl)hept-6-enoic acid, useful for stapling/stapled with another amino acid residue comprising an olefin group to form a staple through one of the two olefin groups and/or with another amino acid residue comprising an olefin group to form a staple through the other of the two olefin groups
  SITE 6: note = (S)-3-(2-amino-2-carboxyethyl)benzoic acid
  SITE 7: note = 1-aminocyclopentane-1-carboxylic acid
  SITE 10: note = L-lysine, useful for stapling/stapled with another amino acid residue comprising a side chain acid group to form a staple through the 6-amino group
  SITE 11: note (S)-3-amino-1-((pent-4-en-1-yloxy)carbonyl)pyrrolidine-3-ca rboxylic acid, useful for stapling/stapled with another amino acid residue comprising an olefin group to form a staple through the olefin group
  SITE 12: note = (S)-2-amino-3-(thiophen-3-yl)propanoic acid
  SITE 13: note = (S)-2-amino-3-(benzo[b]thiophen-3-yl)propanoic acid
  SITE 14: note = L-glutamic acid, useful for stapling/stapled with another amino acid residue comprising a side chain amino group to form a staple through the 4-carboxyl group
  SITE 15: note = C-term amino
XDIXDXXAFKXXXEA

SEQ ID NO: 512 - protein, 15 aa, synthetic construct
  SITE 1: note = N-term Acetic Acid
  SITE 1: note = (R)-2-allylpyrrolidine-2-carboxylic acid, useful for stapling/stapled with another amino acid residue comprising an olefin group to form a staple through the olefin group
  VARIANT 4: note = 2-amino-2-(pent-4-en-1-yl)hept-6-enoic acid, useful for stapling/stapled with another amino acid residue comprising an olefin group to form a staple through one of the two olefin groups and/or with another amino acid residue comprising an olefin group to form a staple through the other of the two olefin groups
  SITE 6: note = (S)-3-(2-amino-2-carboxyethyl)benzoic acid
  SITE 7: note = (S)-2-amino-3-cyclohexylpropanoic acid
  SITE 10: note = L-lysine, useful for stapling/stapled with another amino acid residue comprising a side chain acid group to form a staple through the 6-amino group
  SITE 11: note (S)-3-amino-1-((pent-4-en-1-yloxy)carbonyl)pyrrolidine-3-ca rboxylic acid, useful for stapling/stapled with another amino acid residue comprising an olefin group to form a staple through the olefin group
  SITE 12: note = (S)-2-amino-3-(thiophen-3-yl)propanoic acid
  SITE 13: note = (S)-2-amino-3-(benzo[b]thiophen-3-yl)propanoic acid
  SITE 14: note = L-glutamic acid, useful for stapling/stapled with another amino acid residue comprising a side chain amino group to form a staple through the 4-carboxyl group
  SITE 15: note = C-term amino
XDIXDXXAFKXXXEA

SEQ ID NO: 513 - protein, 15 aa, synthetic construct
  SITE 1: note = N-term Acetic Acid
  SITE 1: note = (R)-2-allylpyrrolidine-2-carboxylic acid, useful for stapling/stapled with another amino acid residue comprising an olefin group to form a staple through the olefin group
  SITE 3: note = (S)-2-amino-3-cyclobutylpropanoic acid
  VARIANT 4: note = 2-amino-2-(pent-4-en-1-yl)hept-6-enoic acid, useful for stapling/stapled with another amino acid residue comprising an olefin group to form a staple through one of the two olefin groups and/or with another amino acid residue comprising an olefin group to form a staple through the other of the two olefin groups
  SITE 6: note = (S)-3-(2-amino-2-carboxyethyl)benzoic acid
  SITE 10: note = L-lysine, useful for stapling/stapled with another amino acid residue comprising a side chain acid group to form a staple through the 6-amino group
  SITE 11: note (S)-3-amino-1-((pent-4-en-1-yloxy)carbonyl)pyrrolidine-3-ca rboxylic acid, useful for stapling/stapled with another amino acid residue comprising an olefin group to form a staple through the olefin group
  SITE 12: note = (S)-2-amino-3-(thiophen-3-yl)propanoic acid
  SITE 13: note = (S)-2-amino-3-(benzo[b]thiophen-3-yl)propanoic acid
  SITE 14: note = L-glutamic acid, useful for stapling/stapled with another amino acid residue comprising a side chain amino group to form a staple through the 4-carboxyl group
  SITE 15: note = C-term amino
XDXXDXFAFKXXXEA

SEQ ID NO: 514 - protein, 15 aa, synthetic construct
  SITE 1: note = N-term Acetic Acid
  SITE 1: note = (R)-2-allylpyrrolidine-2-carboxylic acid, useful for stapling/stapled with another amino acid residue comprising an olefin group to form a staple through the olefin group
  SITE 3: note = (S)-2-amino-3-cyclobutylpropanoic acid
  VARIANT 4: note = 2-amino-2-(pent-4-en-1-yl)hept-6-enoic acid, useful for stapling/stapled with another amino acid residue comprising an olefin group to form a staple through one of the two olefin groups and/or with another amino acid residue comprising an olefin group to form a staple through the other of the two olefin groups
  SITE 6: note = (S)-3-(2-amino-2-carboxyethyl)benzoic acid
  SITE 7: note = 1-aminocyclopentane-1-carboxylic acid
  SITE 10: note = L-lysine, useful for stapling/stapled with another amino acid residue comprising a side chain acid group to form a staple through the 6-amino group
  SITE 11: note (S)-3-amino-1-((pent-4-en-1-yloxy)carbonyl)pyrrolidine-3-ca rboxylic acid, useful for stapling/stapled with another amino acid residue comprising an olefin group to form a staple through the olefin group
  SITE 12: note = (S)-2-amino-3-(thiophen-3-yl)propanoic acid
  SITE 13: note = (S)-2-amino-3-(benzo[b]thiophen-3-yl)propanoic acid
  SITE 14: note = L-glutamic acid, useful for stapling/stapled with another amino acid residue comprising a side chain amino group to form a staple through the 4-carboxyl group
  SITE 15: note = C-term amino
XDXXDXXAFKXXXEA

SEQ ID NO: 515 - protein, 15 aa, synthetic construct
  SITE 1: note = N-term Acetic Acid
  SITE 1: note = (R)-2-allylpyrrolidine-2-carboxylic acid, useful for stapling/stapled with another amino acid residue comprising an olefin group to form a staple through the olefin group
  SITE 3: note = (S)-2-amino-3-cyclobutylpropanoic acid
  VARIANT 4: note = 2-amino-2-(pent-4-en-1-yl)hept-6-enoic acid, useful for stapling/stapled with another amino acid residue comprising an olefin group to form a staple through one of the two olefin groups and/or with another amino acid residue comprising an olefin group to form a staple through the other of the two olefin groups
  SITE 6: note = (S)-3-(2-amino-2-carboxyethyl)benzoic acid
  SITE 7: note = (S)-2-amino-3-cyclohexylpropanoic acid
  SITE 10: note = L-lysine, useful for stapling/stapled with another amino acid residue comprising a side chain acid group to form a staple through the 6-amino group
  SITE 11: note (S)-3-amino-1-((pent-4-en-1-yloxy)carbonyl)pyrrolidine-3-ca rboxylic acid, useful for stapling/stapled with another amino acid residue comprising an olefin group to form a staple through the olefin group
  SITE 12: note = (S)-2-amino-3-(thiophen-3-yl)propanoic acid
  SITE 13: note = (S)-2-amino-3-(benzo[b]thiophen-3-yl)propanoic acid
  SITE 14: note = L-glutamic acid, useful for stapling/stapled with another amino acid residue comprising a side chain amino group to form a staple through the 4-carboxyl group
  SITE 15: note = C-term amino
XDXXDXXAFKXXXEA

SEQ ID NO: 516 - protein, 15 aa, synthetic construct
  SITE 1: note = N-term Acetic Acid
  SITE 1: note = (R)-2-allylpyrrolidine-2-carboxylic acid, useful for stapling/stapled with another amino acid residue comprising an olefin group to form a staple through the olefin group
  SITE 3: note = (S)-2-amino-2-cyclohexylacetic acid
  VARIANT 4: note = 2-amino-2-(pent-4-en-1-yl)hept-6-enoic acid, useful for stapling/stapled with another amino acid residue comprising an olefin group to form a staple through one of the two olefin groups and/or with another amino acid residue comprising an olefin group to form a staple through the other of the two olefin groups
  SITE 6: note = (S)-3-(2-amino-2-carboxyethyl)benzoic acid
  SITE 10: note = L-lysine, useful for stapling/stapled with another amino acid residue comprising a side chain acid group to form a staple through the 6-amino group
  SITE 11: note (S)-3-amino-1-((pent-4-en-1-yloxy)carbonyl)pyrrolidine-3-ca rboxylic acid, useful for stapling/stapled with another amino acid residue comprising an olefin group to form a staple through the olefin group
  SITE 12: note = (S)-2-amino-3-(thiophen-3-yl)propanoic acid
  SITE 13: note = (S)-2-amino-3-(benzo[b]thiophen-3-yl)propanoic acid
  SITE 14: note = L-glutamic acid, useful for stapling/stapled with another amino acid residue comprising a side chain amino group to form a staple through the 4-carboxyl group
  SITE 15: note = C-term amino
XDXXDXFAFKXXXEA

SEQ ID NO: 517 - protein, 15 aa, synthetic construct
  SITE 1: note = N-term Acetic Acid
  SITE 1: note = (R)-2-allylpyrrolidine-2-carboxylic acid, useful for stapling/stapled with another amino acid residue comprising an olefin group to form a staple through the olefin group
  SITE 3: note = (S)-2-amino-2-cyclohexylacetic acid
  VARIANT 4: note = 2-amino-2-(pent-4-en-1-yl)hept-6-enoic acid, useful for stapling/stapled with another amino acid residue comprising an olefin group to form a staple through one of the two olefin groups and/or with another amino acid residue comprising an olefin group to form a staple through the other of the two olefin groups
  SITE 6: note = (S)-3-(2-amino-2-carboxyethyl)benzoic acid
  SITE 7: note = 1-aminocyclopentane-1-carboxylic acid
  SITE 10: note = L-lysine, useful for stapling/stapled with another amino acid residue comprising a side chain acid group to form a staple through the 6-amino group
  SITE 11: note (S)-3-amino-1-((pent-4-en-1-yloxy)carbonyl)pyrrolidine-3-ca rboxylic acid, useful for stapling/stapled with another amino acid residue comprising an olefin group to form a staple through the olefin group
  SITE 12: note = (S)-2-amino-3-(thiophen-3-yl)propanoic acid
  SITE 13: note = (S)-2-amino-3-(benzo[b]thiophen-3-yl)propanoic acid
  SITE 14: note = L-glutamic acid, useful for stapling/stapled with another amino acid residue comprising a side chain amino group to form a staple through the 4-carboxyl group
  SITE 15: note = C-term amino
XDXXDXXAFKXXXEA

SEQ ID NO: 518 - protein, 15 aa, synthetic construct
  SITE 1: note = N-term Acetic Acid
  SITE 1: note = (R)-2-allylpyrrolidine-2-carboxylic acid, useful for stapling/stapled with another amino acid residue comprising an olefin group to form a staple through the olefin group
  SITE 3: note = (S)-2-amino-2-cyclohexylacetic acid
  VARIANT 4: note = 2-amino-2-(pent-4-en-1-yl)hept-6-enoic acid, useful for stapling/stapled with another amino acid residue comprising an olefin group to form a staple through one of the two olefin groups and/or with another amino acid residue comprising an olefin group to form a staple through the other of the two olefin groups
  SITE 6: note = (S)-3-(2-amino-2-carboxyethyl)benzoic acid
  SITE 7: note = (S)-2-amino-3-cyclohexylpropanoic acid
  SITE 10: note = L-lysine, useful for stapling/stapled with another amino acid residue comprising a side chain acid group to form a staple through the 6-amino group
  SITE 11: note (S)-3-amino-1-((pent-4-en-1-yloxy)carbonyl)pyrrolidine-3-ca rboxylic acid, useful for stapling/stapled with another amino acid residue comprising an olefin group to form a staple through the olefin group
  SITE 12: note = (S)-2-amino-3-(thiophen-3-yl)propanoic acid
  SITE 13: note = (S)-2-amino-3-(benzo[b]thiophen-3-yl)propanoic acid
  SITE 14: note = L-glutamic acid, useful for stapling/stapled with another amino acid residue comprising a side chain amino group to form a staple through the 4-carboxyl group
  SITE 15: note = C-term amino
XDXXDXXAFKXXXEA

SEQ ID NO: 519 - protein, 15 aa, synthetic construct
  SITE 1: note = N-term Acetic Acid
  SITE 1: note = (R)-2-allylpyrrolidine-2-carboxylic acid, useful for stapling/stapled with another amino acid residue comprising an olefin group to form a staple through the olefin group
  SITE 3: note = (S)-2-amino-3,3-diphenylpropanoic acid
  VARIANT 4: note = 2-amino-2-(pent-4-en-1-yl)hept-6-enoic acid, useful for stapling/stapled with another amino acid residue comprising an olefin group to form a staple through one of the two olefin groups and/or with another amino acid residue comprising an olefin group to form a staple through the other of the two olefin groups
  SITE 6: note = (S)-3-(2-amino-2-carboxyethyl)benzoic acid
  SITE 10: note = L-lysine, useful for stapling/stapled with another amino acid residue comprising a side chain acid group to form a staple through the 6-amino group
  SITE 11: note (S)-3-amino-1-((pent-4-en-1-yloxy)carbonyl)pyrrolidine-3-ca rboxylic acid, useful for stapling/stapled with another amino acid residue comprising an olefin group to form a staple through the olefin group
  SITE 12: note = (S)-2-amino-3-(thiophen-3-yl)propanoic acid
  SITE 13: note = (S)-2-amino-3-(benzo[b]thiophen-3-yl)propanoic acid
  SITE 14: note = L-glutamic acid, useful for stapling/stapled with another amino acid residue comprising a side chain amino group to form a staple through the 4-carboxyl group
  SITE 15: note = C-term amino
XDXXDXFAFKXXXEA

SEQ ID NO: 520 - protein, 15 aa, synthetic construct
  SITE 1: note = N-term Acetic Acid
  SITE 1: note = (R)-2-allylpyrrolidine-2-carboxylic acid, useful for stapling/stapled with another amino acid residue comprising an olefin group to form a staple through the olefin group
  SITE 3: note = (S)-2-amino-3,3-diphenylpropanoic acid
  VARIANT 4: note = 2-amino-2-(pent-4-en-1-yl)hept-6-enoic acid, useful for stapling/stapled with another amino acid residue comprising an olefin group to form a staple through one of the two olefin groups and/or with another amino acid residue comprising an olefin group to form a staple through the other of the two olefin groups
  SITE 6: note = (S)-3-(2-amino-2-carboxyethyl)benzoic acid
  SITE 7: note = 1-aminocyclopentane-1-carboxylic acid
  SITE 10: note = L-lysine, useful for stapling/stapled with another amino acid residue comprising a side chain acid group to form a staple through the 6-amino group
  SITE 11: note (S)-3-amino-1-((pent-4-en-1-yloxy)carbonyl)pyrrolidine-3-ca rboxylic acid, useful for stapling/stapled with another amino acid residue comprising an olefin group to form a staple through the olefin group
  SITE 12: note = (S)-2-amino-3-(thiophen-3-yl)propanoic acid
  SITE 13: note = (S)-2-amino-3-(benzo[b]thiophen-3-yl)propanoic acid
  SITE 14: note = L-glutamic acid, useful for stapling/stapled with another amino acid residue comprising a side chain amino group to form a staple through the 4-carboxyl group
  SITE 15: note = C-term amino
XDXXDXXAFKXXXEA

SEQ ID NO: 521 - protein, 15 aa, synthetic construct
  SITE 1: note = N-term Acetic Acid
  SITE 1: note = (R)-2-allylpyrrolidine-2-carboxylic acid, useful for stapling/stapled with another amino acid residue comprising an olefin group to form a staple through the olefin group
  SITE 2: note = (S)-3-(2-amino-2-carboxyethyl)benzoic acid
  SITE 3: note = (S)-2-amino-4,4-dimethylpentanoic acid
  VARIANT 4: note = 2-amino-2-(pent-4-en-1-yl)hept-6-enoic acid, useful for stapling/stapled with another amino acid residue comprising an olefin group to form a staple through one of the two olefin groups and/or with another amino acid residue comprising an olefin group to form a staple through the other of the two olefin groups
  SITE 7: note = 2-amino-2-methylpropanoic acid
  SITE 10: note = L-lysine, useful for stapling/stapled with another amino acid residue comprising a side chain acid group to form a staple through the 6-amino group
  SITE 11: note (S)-3-amino-1-((pent-4-en-1-yloxy)carbonyl)pyrrolidine-3-ca rboxylic acid, useful for stapling/stapled with another amino acid residue comprising an olefin group to form a staple through the olefin group
  SITE 12: note = (S)-2-amino-3-(thiophen-3-yl)propanoic acid
  SITE 13: note = (S)-2-amino-3-(benzo[b]thiophen-3-yl)propanoic acid
  SITE 14: note = L-glutamic acid, useful for stapling/stapled with another amino acid residue comprising a side chain amino group to form a staple through the 4-carboxyl group
  SITE 15: note = C-term amino
XXXXDDXAFKXXXEA

SEQ ID NO: 522 - protein, 15 aa, synthetic construct
  SITE 1: note = N-term Acetic Acid
  SITE 1: note = (R)-2-allylpyrrolidine-2-carboxylic acid, useful for stapling/stapled with another amino acid residue comprising an olefin group to form a staple through the olefin group
  SITE 3: note = (S)-2-amino-4,4-dimethylpentanoic acid
  VARIANT 4: note = 2-amino-2-(pent-4-en-1-yl)hept-6-enoic acid, useful for stapling/stapled with another amino acid residue comprising an olefin group to form a staple through one of the two olefin groups and/or with another amino acid residue comprising an olefin group to form a staple through the other of the two olefin groups
  SITE 5: note = (S)-3-(2-amino-2-carboxyethyl)benzoic acid
  SITE 7: note = 2-amino-2-methylpropanoic acid
  SITE 10: note = L-lysine, useful for stapling/stapled with another amino acid residue comprising a side chain acid group to form a staple through the 6-amino group
  SITE 11: note (S)-3-amino-1-((pent-4-en-1-yloxy)carbonyl)pyrrolidine-3-ca rboxylic acid, useful for stapling/stapled with another amino acid residue comprising an olefin group to form a staple through the olefin group
  SITE 12: note = (S)-2-amino-3-(thiophen-3-yl)propanoic acid
  SITE 13: note = (S)-2-amino-3-(benzo[b]thiophen-3-yl)propanoic acid
  SITE 14: note = L-glutamic acid, useful for stapling/stapled with another amino acid residue comprising a side chain amino group to form a staple through the 4-carboxyl group
  SITE 15: note = C-term amino
XDXXXDXAFKXXXEA

SEQ ID NO: 523 - protein, 15 aa, synthetic construct
  SITE 1: note = N-term Acetic Acid
  SITE 1: note = (R)-2-allylpyrrolidine-2-carboxylic acid, useful for stapling/stapled with another amino acid residue comprising an olefin group to form a staple through the olefin group
  SITE 3: note = L-lysine, useful for stapling/stapled with another amino acid residue comprising a side chain acid group to form another staple through the 6-amino group
  VARIANT 4: note = 2-amino-2-(pent-4-en-1-yl)hept-6-enoic acid, useful for stapling/stapled with another amino acid residue comprising an olefin group to form a staple through one of the two olefin groups and/or with another amino acid residue comprising an olefin group to form a staple through the other of the two olefin groups
  SITE 6: note = (S)-3-(2-amino-2-carboxyethyl)benzoic acid
  SITE 7: note = L-glutamic acid, useful for stapling/stapled with another amino acid residue comprising a side chain amino group to form another staple through the 4-carboxyl group
  SITE 10: note = L-lysine, useful for stapling/stapled with another amino acid residue comprising a side chain acid group to form a staple through the 6-amino group
  SITE 11: note (S)-3-amino-1-((pent-4-en-1-yloxy)carbonyl)pyrrolidine-3-ca rboxylic acid, useful for stapling/stapled with another amino acid residue comprising an olefin group to form a staple through the olefin group
  SITE 12: note = (S)-2-amino-3-(thiophen-3-yl)propanoic acid
  SITE 13: note = (S)-2-amino-3-(benzo[b]thiophen-3-yl)propanoic acid
  SITE 14: note = L-glutamic acid, useful for stapling/stapled with another amino acid residue comprising a side chain amino group to form a staple through the 4-carboxyl group
  SITE 15: note = C-term amino
XDKXDXEAFKXXXEA

SEQ ID NO: 524 - protein, 15 aa, synthetic construct
  SITE 1: note = N-term Acetic Acid
  SITE 1: note = (R)-2-allylpyrrolidine-2-carboxylic acid, useful for stapling/stapled with another amino acid residue comprising an olefin group to form a staple through the olefin group
  SITE 3: note = N6-methyl-L-lysine, useful for stapling/stapled with another amino acid residue comprising a side chain acid group to form another staple through the side chain amino group
  VARIANT 4: note = 2-amino-2-(pent-4-en-1-yl)hept-6-enoic acid, useful for stapling/stapled with another amino acid residue comprising an olefin group to form a staple through one of the two olefin groups and/or with another amino acid residue comprising an olefin group to form a staple through the other of the two olefin groups
  SITE 6: note = (S)-3-(2-amino-2-carboxyethyl)benzoic acid
  SITE 7: note = L-glutamic acid, useful for stapling/stapled with another amino acid residue comprising a side chain amino group to form another staple through the 4-carboxyl group
  SITE 10: note = L-lysine, useful for stapling/stapled with another amino acid residue comprising a side chain acid group to form a staple through the 6-amino group
  SITE 11: note (S)-3-amino-1-((pent-4-en-1-yloxy)carbonyl)pyrrolidine-3-ca rboxylic acid, useful for stapling/stapled with another amino acid residue comprising an olefin group to form a staple through the olefin group
  SITE 12: note = (S)-2-amino-3-(thiophen-3-yl)propanoic acid
  SITE 13: note = (S)-2-amino-3-(benzo[b]thiophen-3-yl)propanoic acid
  SITE 14: note = L-glutamic acid, useful for stapling/stapled with another amino acid residue comprising a side chain amino group to form a staple through the 4-carboxyl group
  SITE 15: note = C-term amino
XDKXDXEAFKXXXEA

SEQ ID NO: 525 - protein, 15 aa, synthetic construct
  SITE 1: note = N-term hexanoic acid
  SITE 1: note = (R)-2-allylpyrrolidine-2-carboxylic acid, useful for stapling/stapled with another amino acid residue comprising an olefin group to form a staple through the olefin group
  SITE 3: note = (S)-2-amino-4,4-dimethylpentanoic acid
  VARIANT 4: note = 2-amino-2-(pent-4-en-1-yl)hept-6-enoic acid, useful for stapling/stapled with another amino acid residue comprising an olefin group to form a staple through one of the two olefin groups and/or with another amino acid residue comprising an olefin group to form a staple through the other of the two olefin groups
  SITE 6: note = (S)-3-(2-amino-2-carboxyethyl)benzoic acid
  SITE 7: note = 2-amino-2-methylpropanoic acid
  SITE 10: note = L-lysine, useful for stapling/stapled with another amino acid residue comprising a side chain acid group to form a staple through the 6-amino group
  SITE 11: note (S)-3-amino-1-((pent-4-en-1-yloxy)carbonyl)pyrrolidine-3-ca rboxylic acid, useful for stapling/stapled with another amino acid residue comprising an olefin group to form a staple through the olefin group
  SITE 12: note = (S)-2-amino-3-(thiophen-3-yl)propanoic acid
  SITE 13: note = (S)-2-amino-3-(benzo[b]thiophen-3-yl)propanoic acid
  SITE 14: note = L-glutamic acid, useful for stapling/stapled with another amino acid residue comprising a side chain amino group to form a staple through the 4-carboxyl group
  SITE 15: note = C-term amino
XDXXDXXAFKXXXEA

SEQ ID NO: 526 - protein, 15 aa, synthetic construct
  SITE 1: note = N-term butyric acid
  SITE 1: note = (R)-2-allylpyrrolidine-2-carboxylic acid, useful for stapling/stapled with another amino acid residue comprising an olefin group to form a staple through the olefin group
  SITE 3: note = (S)-2-amino-4,4-dimethylpentanoic acid
  VARIANT 4: note = 2-amino-2-(pent-4-en-1-yl)hept-6-enoic acid, useful for stapling/stapled with another amino acid residue comprising an olefin group to form a staple through one of the two olefin groups and/or with another amino acid residue comprising an olefin group to form a staple through the other of the two olefin groups
  SITE 6: note = (S)-3-(2-amino-2-carboxyethyl)benzoic acid
  SITE 7: note = 2-amino-2-methylpropanoic acid
  SITE 10: note = L-lysine, useful for stapling/stapled with another amino acid residue comprising a side chain acid group to form a staple through the 6-amino group
  SITE 11: note (S)-3-amino-1-((pent-4-en-1-yloxy)carbonyl)pyrrolidine-3-ca rboxylic acid, useful for stapling/stapled with another amino acid residue comprising an olefin group to form a staple through the olefin group
  SITE 12: note = (S)-2-amino-3-(thiophen-3-yl)propanoic acid
  SITE 13: note = (S)-2-amino-3-(benzo[b]thiophen-3-yl)propanoic acid
  SITE 14: note = L-glutamic acid, useful for stapling/stapled with another amino acid residue comprising a side chain amino group to form a staple through the 4-carboxyl group
  SITE 15: note = C-term amino
XDXXDXXAFKXXXEA

SEQ ID NO: 527 - protein, 15 aa, synthetic construct
  SITE 1: note = N-term pyrazine-2-carboxylic acid
  SITE 1: note = (R)-2-allylpyrrolidine-2-carboxylic acid, useful for stapling/stapled with another amino acid residue comprising an olefin group to form a staple through the olefin group
  SITE 3: note = (S)-2-amino-4,4-dimethylpentanoic acid
  VARIANT 4: note = 2-amino-2-(pent-4-en-1-yl)hept-6-enoic acid, useful for stapling/stapled with another amino acid residue comprising an olefin group to form a staple through one of the two olefin groups and/or with another amino acid residue comprising an olefin group to form a staple through the other of the two olefin groups
  SITE 6: note = (S)-3-(2-amino-2-carboxyethyl)benzoic acid
  SITE 7: note = 2-amino-2-methylpropanoic acid
  SITE 10: note = L-lysine, useful for stapling/stapled with another amino acid residue comprising a side chain acid group to form a staple through the 6-amino group
  SITE 11: note (S)-3-amino-1-((pent-4-en-1-yloxy)carbonyl)pyrrolidine-3-ca rboxylic acid, useful for stapling/stapled with another amino acid residue comprising an olefin group to form a staple through the olefin group
  SITE 12: note = (S)-2-amino-3-(thiophen-3-yl)propanoic acid
  SITE 13: note = (S)-2-amino-3-(benzo[b]thiophen-3-yl)propanoic acid
  SITE 14: note = L-glutamic acid, useful for stapling/stapled with another amino acid residue comprising a side chain amino group to form a staple through the 4-carboxyl group
  SITE 15: note = C-term amino
XDXXDXXAFKXXXEA

SEQ ID NO: 528 - protein, 15 aa, synthetic construct
  SITE 1: note = N-term 3-phenylpropanoic acid
  SITE 1: note = (R)-2-allylpyrrolidine-2-carboxylic acid, useful for stapling/stapled with another amino acid residue comprising an olefin group to form a staple through the olefin group
  SITE 3: note = (S)-2-amino-4,4-dimethylpentanoic acid
  VARIANT 4: note = 2-amino-2-(pent-4-en-1-yl)hept-6-enoic acid, useful for stapling/stapled with another amino acid residue comprising an olefin group to form a staple through one of the two olefin groups and/or with another amino acid residue comprising an olefin group to form a staple through the other of the two olefin groups
  SITE 6: note = (S)-3-(2-amino-2-carboxyethyl)benzoic acid
  SITE 7: note = 2-amino-2-methylpropanoic acid
  SITE 10: note = L-lysine, useful for stapling/stapled with another amino acid residue comprising a side chain acid group to form a staple through the 6-amino group
  SITE 11: note (S)-3-amino-1-((pent-4-en-1-yloxy)carbonyl)pyrrolidine-3-ca rboxylic acid, useful for stapling/stapled with another amino acid residue comprising an olefin group to form a staple through the olefin group
  SITE 12: note = (S)-2-amino-3-(thiophen-3-yl)propanoic acid
  SITE 13: note = (S)-2-amino-3-(benzo[b]thiophen-3-yl)propanoic acid
  SITE 14: note = L-glutamic acid, useful for stapling/stapled with another amino acid residue comprising a side chain amino group to form a staple through the 4-carboxyl group
  SITE 15: note = C-term amino
XDXXDXXAFKXXXEA

SEQ ID NO: 529 - protein, 15 aa, synthetic construct
  SITE 1: note = N-term 3-methoxypropanoic acid
  SITE 1: note = (R)-2-allylpyrrolidine-2-carboxylic acid, useful for stapling/stapled with another amino acid residue comprising an olefin group to form a staple through the olefin group
  SITE 3: note = (S)-2-amino-4,4-dimethylpentanoic acid
  VARIANT 4: note = 2-amino-2-(pent-4-en-1-yl)hept-6-enoic acid, useful for stapling/stapled with another amino acid residue comprising an olefin group to form a staple through one of the two olefin groups and/or with another amino acid residue comprising an olefin group to form a staple through the other of the two olefin groups
  SITE 6: note = (S)-3-(2-amino-2-carboxyethyl)benzoic acid
  SITE 7: note = 2-amino-2-methylpropanoic acid
  SITE 10: note = L-lysine, useful for stapling/stapled with another amino acid residue comprising a side chain acid group to form a staple through the 6-amino group
  SITE 11: note (S)-3-amino-1-((pent-4-en-1-yloxy)carbonyl)pyrrolidine-3-ca rboxylic acid, useful for stapling/stapled with another amino acid residue comprising an olefin group to form a staple through the olefin group
  SITE 12: note = (S)-2-amino-3-(thiophen-3-yl)propanoic acid
  SITE 13: note = (S)-2-amino-3-(benzo[b]thiophen-3-yl)propanoic acid
  SITE 14: note = L-glutamic acid, useful for stapling/stapled with another amino acid residue comprising a side chain amino group to form a staple through the 4-carboxyl group
  SITE 15: note = C-term amino
XDXXDXXAFKXXXEA

SEQ ID NO: 530 - protein, 15 aa, synthetic construct
  SITE 1: note = N-term (R)-4-((3R,5R,8R,9S,10S,13R,14S,17R)-3-hydroxy -10,13-dimethylhexadecahydro-1H-cyclopenta[a]phenanthrene -17-yl)pentanoic acid
  SITE 1: note = (R)-2-allylpyrrolidine-2-carboxylic acid, useful for stapling/stapled with another amino acid residue comprising an olefin group to form a staple through the olefin group
  SITE 3: note = (S)-2-amino-4,4-dimethylpentanoic acid
  VARIANT 4: note = 2-amino-2-(pent-4-en-1-yl)hept-6-enoic acid, useful for stapling/stapled with another amino acid residue comprising an olefin group to form a staple through one of the two olefin groups and/or with another amino acid residue comprising an olefin group to form a staple through the other of the two olefin groups
  SITE 6: note = (S)-3-(2-amino-2-carboxyethyl)benzoic acid
  SITE 7: note = 2-amino-2-methylpropanoic acid
  SITE 10: note = L-lysine, useful for stapling/stapled with another amino acid residue comprising a side chain acid group to form a staple through the 6-amino group
  SITE 11: note (S)-3-amino-1-((pent-4-en-1-yloxy)carbonyl)pyrrolidine-3-ca rboxylic acid, useful for stapling/stapled with another amino acid residue comprising an olefin group to form a staple through the olefin group
  SITE 12: note = (S)-2-amino-3-(thiophen-3-yl)propanoic acid
  SITE 13: note = (S)-2-amino-3-(benzo[b]thiophen-3-yl)propanoic acid
  SITE 14: note = L-glutamic acid, useful for stapling/stapled with another amino acid residue comprising a side chain amino group to form a staple through the 4-carboxyl group
  SITE 15: note = C-term amino
XDXXDXXAFKXXXEA

SEQ ID NO: 531 - protein, 15 aa, synthetic construct
  SITE 1: note = N-term 2-fluorobenzoic acid
  SITE 1: note = (R)-2-allylpyrrolidine-2-carboxylic acid, useful for stapling/stapled with another amino acid residue comprising an olefin group to form a staple through the olefin group
  SITE 3: note = (S)-2-amino-4,4-dimethylpentanoic acid
  VARIANT 4: note = 2-amino-2-(pent-4-en-1-yl)hept-6-enoic acid, useful for stapling/stapled with another amino acid residue comprising an olefin group to form a staple through one of the two olefin groups and/or with another amino acid residue comprising an olefin group to form a staple through the other of the two olefin groups
  SITE 6: note = (S)-3-(2-amino-2-carboxyethyl)benzoic acid
  SITE 7: note = 2-amino-2-methylpropanoic acid
  SITE 10: note = L-lysine, useful for stapling/stapled with another amino acid residue comprising a side chain acid group to form a staple through the 6-amino group
  SITE 11: note (S)-3-amino-1-((pent-4-en-1-yloxy)carbonyl)pyrrolidine-3-ca rboxylic acid, useful for stapling/stapled with another amino acid residue comprising an olefin group to form a staple through the olefin group
  SITE 12: note = (S)-2-amino-3-(thiophen-3-yl)propanoic acid
  SITE 13: note = (S)-2-amino-3-(benzo[b]thiophen-3-yl)propanoic acid
  SITE 14: note = L-glutamic acid, useful for stapling/stapled with another amino acid residue comprising a side chain amino group to form a staple through the 4-carboxyl group
  SITE 15: note = C-term amino
XDXXDXXAFKXXXEA

SEQ ID NO: 532 - protein, 15 aa, synthetic construct
  SITE 1: note = N-term benzoic acid
  SITE 1: note = (R)-2-allylpyrrolidine-2-carboxylic acid, useful for stapling/stapled with another amino acid residue comprising an olefin group to form a staple through the olefin group
  SITE 3: note = (S)-2-amino-4,4-dimethylpentanoic acid
  VARIANT 4: note = 2-amino-2-(pent-4-en-1-yl)hept-6-enoic acid, useful for stapling/stapled with another amino acid residue comprising an olefin group to form a staple through one of the two olefin groups and/or with another amino acid residue comprising an olefin group to form a staple through the other of the two olefin groups
  SITE 6: note = (S)-3-(2-amino-2-carboxyethyl)benzoic acid
  SITE 7: note = 2-amino-2-methylpropanoic acid
  SITE 10: note = L-lysine, useful for stapling/stapled with another amino acid residue comprising a side chain acid group to form a staple through the 6-amino group
  SITE 11: note (S)-3-amino-1-((pent-4-en-1-yloxy)carbonyl)pyrrolidine-3-ca rboxylic acid, useful for stapling/stapled with another amino acid residue comprising an olefin group to form a staple through the olefin group
  SITE 12: note = (S)-2-amino-3-(thiophen-3-yl)propanoic acid
  SITE 13: note = (S)-2-amino-3-(benzo[b]thiophen-3-yl)propanoic acid
  SITE 14: note = L-glutamic acid, useful for stapling/stapled with another amino acid residue comprising a side chain amino group to form a staple through the 4-carboxyl group
  SITE 15: note = C-term amino
XDXXDXXAFKXXXEA

SEQ ID NO: 533 - protein, 15 aa, synthetic construct
  SITE 1: note = N-term methanesulfonic acid
  SITE 1: note = (R)-2-allylpyrrolidine-2-carboxylic acid, useful for stapling/stapled with another amino acid residue comprising an olefin group to form a staple through the olefin group
  SITE 3: note = (S)-2-amino-4,4-dimethylpentanoic acid
  VARIANT 4: note = 2-amino-2-(pent-4-en-1-yl)hept-6-enoic acid, useful for stapling/stapled with another amino acid residue comprising an olefin group to form a staple through one of the two olefin groups and/or with another amino acid residue comprising an olefin group to form a staple through the other of the two olefin groups
  SITE 6: note = (S)-3-(2-amino-2-carboxyethyl)benzoic acid
  SITE 7: note = 2-amino-2-methylpropanoic acid
  SITE 10: note = L-lysine, useful for stapling/stapled with another amino acid residue comprising a side chain acid group to form a staple through the 6-amino group
  SITE 11: note (S)-3-amino-1-((pent-4-en-1-yloxy)carbonyl)pyrrolidine-3-ca rboxylic acid, useful for stapling/stapled with another amino acid residue comprising an olefin group to form a staple through the olefin group
  SITE 12: note = (S)-2-amino-3-(thiophen-3-yl)propanoic acid
  SITE 13: note = (S)-2-amino-3-(benzo[b]thiophen-3-yl)propanoic acid
  SITE 14: note = L-glutamic acid, useful for stapling/stapled with another amino acid residue comprising a side chain amino group to form a staple through the 4-carboxyl group
  SITE 15: note = C-term amino
XDXXDXXAFKXXXEA

SEQ ID NO: 534 - protein, 15 aa, synthetic construct
  SITE 1: note = N-term 4-methylbenzenesulfonamide
  SITE 1: note = (R)-2-allylpyrrolidine-2-carboxylic acid, useful for stapling/stapled with another amino acid residue comprising an olefin group to form a staple through the olefin group
  SITE 3: note = (S)-2-amino-4,4-dimethylpentanoic acid
  VARIANT 4: note = 2-amino-2-(pent-4-en-1-yl)hept-6-enoic acid, useful for stapling/stapled with another amino acid residue comprising an olefin group to form a staple through one of the two olefin groups and/or with another amino acid residue comprising an olefin group to form a staple through the other of the two olefin groups
  SITE 6: note = (S)-3-(2-amino-2-carboxyethyl)benzoic acid
  SITE 7: note = 2-amino-2-methylpropanoic acid
  SITE 10: note = L-lysine, useful for stapling/stapled with another amino acid residue comprising a side chain acid group to form a staple through the 6-amino group
  SITE 11: note (S)-3-amino-1-((pent-4-en-1-yloxy)carbonyl)pyrrolidine-3-ca rboxylic acid, useful for stapling/stapled with another amino acid residue comprising an olefin group to form a staple through the olefin group
  SITE 12: note = (S)-2-amino-3-(thiophen-3-yl)propanoic acid
  SITE 13: note = (S)-2-amino-3-(benzo[b]thiophen-3-yl)propanoic acid
  SITE 14: note = L-glutamic acid, useful for stapling/stapled with another amino acid residue comprising a side chain amino group to form a staple through the 4-carboxyl group
  SITE 15: note = C-term amino
XDXXDXXAFKXXXEA

SEQ ID NO: 535 - protein, 15 aa, synthetic construct
  SITE 1: note = N-term Acetic Acid
  SITE 1: note = (R)-2-allylpyrrolidine-2-carboxylic acid, useful for stapling/stapled with another amino acid residue comprising an olefin group to form a staple through the olefin group
  SITE 3: note = (S)-2-amino-4,4-dimethylpentanoic acid
  VARIANT 4: note = 2-amino-2-(pent-4-en-1-yl)hept-6-enoic acid, useful for stapling/stapled with another amino acid residue comprising an olefin group to form a staple through one of the two olefin groups and/or with another amino acid residue comprising an olefin group to form a staple through the other of the two olefin groups
  SITE 6: note = (S)-3-(2-amino-2-carboxyethyl)benzoic acid
  SITE 7: note = 2-amino-2-methylpropanoic acid
  SITE 10: note = L-homocysteine, sulfur bonded to the methyl at position 1 of 1,4-dimethylbenzene, useful for stapling/stapled with another thiol through the methyl at position 4 of 1,4-dimethylbenzene
  SITE 11: note (S)-3-amino-1-((pent-4-en-1-yloxy)carbonyl)pyrrolidine-3-ca rboxylic acid, useful for stapling/stapled with another amino acid residue comprising an olefin group to form a staple through the olefin group
  SITE 12: note = (S)-2-amino-3-(thiophen-3-yl)propanoic acid
  SITE 13: note = (S)-2-amino-3-(benzo[b]thiophen-3-yl)propanoic acid
  SITE 15: note = C-term amino
XDXXDXXAFCXXXCA

SEQ ID NO: 536 - protein, 15 aa, synthetic construct
  SITE 1: note = N-term Acetic Acid
  SITE 1: note = (R)-2-allylpyrrolidine-2-carboxylic acid, useful for stapling/stapled with another amino acid residue comprising an olefin group to form a staple through the olefin group
  SITE 3: note = (S)-2-amino-4,4-dimethylpentanoic acid
  VARIANT 4: note = 2-amino-2-(pent-4-en-1-yl)hept-6-enoic acid, useful for stapling/stapled with another amino acid residue comprising an olefin group to form a staple through one of the two olefin groups and/or with another amino acid residue comprising an olefin group to form a staple through the other of the two olefin groups
  SITE 6: note = (S)-3-(2-amino-2-carboxyethyl)benzoic acid
  SITE 7: note = 2-amino-2-methylpropanoic acid
  SITE 10: note = Cysteine, sulfur bonded to the methyl at position 1 of 1,4-dimethylbenzene, useful for stapling/stapled with another thiol through the methyl at position 4 of 1,4-dimethylbenzene
  SITE 11: note (S)-3-amino-1-((pent-4-en-1-yloxy)carbonyl)pyrrolidine-3-ca rboxylic acid, useful for stapling/stapled with another amino acid residue comprising an olefin group to form a staple through the olefin group
  SITE 12: note = (S)-2-amino-3-(thiophen-3-yl)propanoic acid
  SITE 13: note = (S)-2-amino-3-(benzo[b]thiophen-3-yl)propanoic acid
  SITE 14: note = L-homocysteine
  SITE 15: note = C-term amino
XDXXDXXAFCXXXCA

SEQ ID NO: 537 - protein, 15 aa, synthetic construct
  SITE 1: note = N-term Acetic Acid
  SITE 1: note = (R)-2-allylpyrrolidine-2-carboxylic acid, useful for stapling/stapled with another amino acid residue comprising an olefin group to form a staple through the olefin group
  SITE 3: note = (S)-2-amino-4,4-dimethylpentanoic acid
  VARIANT 4: note = 2-amino-2-(pent-4-en-1-yl)hept-6-enoic acid, useful for stapling/stapled with another amino acid residue comprising an olefin group to form a staple through one of the two olefin groups and/or with another amino acid residue comprising an olefin group to form a staple through the other of the two olefin groups
  SITE 6: note = (S)-3-(2-amino-2-carboxyethyl)benzoic acid
  SITE 7: note = 2-amino-2-methylpropanoic acid
  SITE 10: note = L-homocysteine, sulfur bonded to the methyl at position 1 of 1,3-dimethylbenzene, useful for stapling/stapled with another thiol through the methyl at position 3 of 1,3-dimethylbenzene
  SITE 11: note (S)-3-amino-1-((pent-4-en-1-yloxy)carbonyl)pyrrolidine-3-ca rboxylic acid, useful for stapling/stapled with another amino acid residue comprising an olefin group to form a staple through the olefin group
  SITE 12: note = (S)-2-amino-3-(thiophen-3-yl)propanoic acid
  SITE 13: note = (S)-2-amino-3-(benzo[b]thiophen-3-yl)propanoic acid
  SITE 14: note = L-homocysteine
  SITE 15: note = C-term amino
XDXXDXXAFCXXXCA

SEQ ID NO: 538 - protein, 15 aa, synthetic construct
  SITE 1: note = N-term Acetic Acid
  SITE 1: note = (R)-2-allylpyrrolidine-2-carboxylic acid, useful for stapling/stapled with another amino acid residue comprising an olefin group to form a staple through the olefin group
  SITE 3: note = (S)-2-amino-4,4-dimethylpentanoic acid
  VARIANT 4: note = 2-amino-2-(pent-4-en-1-yl)hept-6-enoic acid, useful for stapling/stapled with another amino acid residue comprising an olefin group to form a staple through one of the two olefin groups and/or with another amino acid residue comprising an olefin group to form a staple through the other of the two olefin groups
  SITE 6: note = (S)-3-(2-amino-2-carboxyethyl)benzoic acid
  SITE 7: note = 2-amino-2-methylpropanoic acid
  SITE 10: note = L-homocysteine, sulfur bonded to the methyl at position 1 of 1,4-dimethylbenzene, useful for stapling/stapled with another thiol through the methyl at position 4 of 1,4-dimethylbenzene
  SITE 11: note (S)-3-amino-1-((pent-4-en-1-yloxy)carbonyl)pyrrolidine-3-ca rboxylic acid, useful for stapling/stapled with another amino acid residue comprising an olefin group to form a staple through the olefin group
  SITE 12: note = (S)-2-amino-3-(thiophen-3-yl)propanoic acid
  SITE 13: note = (S)-2-amino-3-(benzo[b]thiophen-3-yl)propanoic acid
  SITE 14: note = L-homocysteine
  SITE 15: note = C-term amino
XDXXDXXAFCXXXCA

SEQ ID NO: 539 - protein, 15 aa, synthetic construct
  SITE 1: note = N-term Acetic Acid
  SITE 1: note = (R)-2-allylpyrrolidine-2-carboxylic acid, useful for stapling/stapled with another amino acid residue comprising an olefin group to form a staple through the olefin group
  SITE 3: note = (S)-2-amino-4,4-dimethylpentanoic acid
  VARIANT 4: note = 2-amino-2-(pent-4-en-1-yl)hept-6-enoic acid, useful for stapling/stapled with another amino acid residue comprising an olefin group to form a staple through one of the two olefin groups and/or with another amino acid residue comprising an olefin group to form a staple through the other of the two olefin groups
  SITE 6: note = (S)-3-(2-amino-2-carboxyethyl)benzoic acid
  SITE 7: note = 2-amino-2-methylpropanoic acid
  SITE 10: note = L-lysine, useful for stapling/stapled with another amino acid residue comprising a side chain acid group to form a staple through the 6-amino group
  SITE 11: note (S)-3-amino-1-((pent-4-en-1-yloxy)carbonyl)pyrrolidine-3-ca rboxylic acid, useful for stapling/stapled with another amino acid residue comprising an olefin group to form a staple through the olefin group
  SITE 12: note = (S)-2-aminoheptanoic acid
  SITE 13: note = (S)-2-amino-3-(3,4-dichlorophenyl)propanoic acid
  SITE 14: note = L-glutamic acid, useful for stapling/stapled with another amino acid residue comprising a side chain amino group to form a staple through the 4-carboxyl group
  SITE 15: note = C-term amino
XDXXDXXAFKXXXEA

SEQ ID NO: 540 - protein, 15 aa, synthetic construct
  SITE 1: note = N-term Acetic Acid
  SITE 1: note = (R)-2-allylpyrrolidine-2-carboxylic acid, useful for stapling/stapled with another amino acid residue comprising an olefin group to form a staple through the olefin group
  SITE 3: note = (S)-2-amino-4,4-dimethylpentanoic acid
  VARIANT 4: note = 2-amino-2-(pent-4-en-1-yl)hept-6-enoic acid, useful for stapling/stapled with another amino acid residue comprising an olefin group to form a staple through one of the two olefin groups and/or with another amino acid residue comprising an olefin group to form a staple through the other of the two olefin groups
  SITE 6: note = (S)-3-(2-amino-2-carboxyethyl)benzoic acid
  SITE 7: note = 2-amino-2-methylpropanoic acid
  SITE 10: note = L-lysine, useful for stapling/stapled with another amino acid residue comprising a side chain acid group to form a staple through the 6-amino group
  SITE 11: note (S)-3-amino-1-((pent-4-en-1-yloxy)carbonyl)pyrrolidine-3-ca rboxylic acid, useful for stapling/stapled with another amino acid residue comprising an olefin group to form a staple through the olefin group
  SITE 12: note = (S)-2-aminoheptanoic acid
  SITE 13: note = (S)-2-amino-3-(3,4-dimethylphenyl)propanoic acid
  SITE 14: note = L-glutamic acid, useful for stapling/stapled with another amino acid residue comprising a side chain amino group to form a staple through the 4-carboxyl group
  SITE 15: note = C-term amino
XDXXDXXAFKXXXEA

SEQ ID NO: 541 - protein, 15 aa, synthetic construct
  SITE 1: note = N-term Acetic Acid
  SITE 1: note = (R)-2-allylpyrrolidine-2-carboxylic acid, useful for stapling/stapled with another amino acid residue comprising an olefin group to form a staple through the olefin group
  SITE 3: note = (S)-2-amino-4,4-dimethylpentanoic acid
  VARIANT 4: note = 2-amino-2-(pent-4-en-1-yl)hept-6-enoic acid, useful for stapling/stapled with another amino acid residue comprising an olefin group to form a staple through one of the two olefin groups and/or with another amino acid residue comprising an olefin group to form a staple through the other of the two olefin groups
  SITE 6: note = (S)-3-(2-amino-2-carboxyethyl)benzoic acid
  SITE 7: note = 2-amino-2-methylpropanoic acid
  SITE 10: note = L-lysine, useful for stapling/stapled with another amino acid residue comprising a side chain acid group to form a staple through the 6-amino group
  SITE 11: note (S)-3-amino-1-((pent-4-en-1-yloxy)carbonyl)pyrrolidine-3-ca rboxylic acid, useful for stapling/stapled with another amino acid residue comprising an olefin group to form a staple through the olefin group
  SITE 12: note = (S)-2-aminoheptanoic acid
  SITE 13: note = (S)-2-amino-3-(3-bromophenyl)propanoic acid
  SITE 14: note = L-glutamic acid, useful for stapling/stapled with another amino acid residue comprising a side chain amino group to form a staple through the 4-carboxyl group
  SITE 15: note = C-term amino
XDXXDXXAFKXXXEA

SEQ ID NO: 542 - protein, 15 aa, synthetic construct
  SITE 1: note = N-term Acetic Acid
  SITE 1: note = (R)-2-allylpyrrolidine-2-carboxylic acid, useful for stapling/stapled with another amino acid residue comprising an olefin group to form a staple through the olefin group
  SITE 3: note = (S)-2-amino-4,4-dimethylpentanoic acid
  VARIANT 4: note = 2-amino-2-(pent-4-en-1-yl)hept-6-enoic acid, useful for stapling/stapled with another amino acid residue comprising an olefin group to form a staple through one of the two olefin groups and/or with another amino acid residue comprising an olefin group to form a staple through the other of the two olefin groups
  SITE 6: note = (S)-3-(2-amino-2-carboxyethyl)benzoic acid
  SITE 7: note = 2-amino-2-methylpropanoic acid
  SITE 10: note = L-lysine, useful for stapling/stapled with another amino acid residue comprising a side chain acid group to form a staple through the 6-amino group
  SITE 11: note (S)-3-amino-1-((pent-4-en-1-yloxy)carbonyl)pyrrolidine-3-ca rboxylic acid, useful for stapling/stapled with another amino acid residue comprising an olefin group to form a staple through the olefin group
  SITE 12: note = (S)-2-aminoheptanoic acid
  SITE 13: note = (S)-2-amino-3-(naphthalen-2-yl)propanoic acid
  SITE 14: note = L-glutamic acid, useful for stapling/stapled with another amino acid residue comprising a side chain amino group to form a staple through the 4-carboxyl group
  SITE 15: note = C-term amino
XDXXDXXAFKXXXEA

SEQ ID NO: 543 - protein, 15 aa, synthetic construct
  SITE 1: note = N-term Acetic Acid
  SITE 1: note = (R)-2-allylpyrrolidine-2-carboxylic acid, useful for stapling/stapled with another amino acid residue comprising an olefin group to form a staple through the olefin group
  SITE 3: note = (S)-2-amino-4,4-dimethylpentanoic acid
  VARIANT 4: note = 2-amino-2-(pent-4-en-1-yl)hept-6-enoic acid, useful for stapling/stapled with another amino acid residue comprising an olefin group to form a staple through one of the two olefin groups and/or with another amino acid residue comprising an olefin group to form a staple through the other of the two olefin groups
  SITE 6: note = (S)-3-(2-amino-2-carboxyethyl)benzoic acid
  SITE 7: note = 2-amino-2-methylpropanoic acid
  SITE 10: note = L-lysine, useful for stapling/stapled with another amino acid residue comprising a side chain acid group to form a staple through the 6-amino group
  SITE 11: note (S)-3-amino-1-((pent-4-en-1-yloxy)carbonyl)pyrrolidine-3-ca rboxylic acid, useful for stapling/stapled with another amino acid residue comprising an olefin group to form a staple through the olefin group
  SITE 12: note = (S)-2-aminoheptanoic acid
  SITE 13: note = (2S,3R)-2-amino-3-(naphthalen-2-yl)butanoic acid
  SITE 14: note = L-glutamic acid, useful for stapling/stapled with another amino acid residue comprising a side chain amino group to form a staple through the 4-carboxyl group
  SITE 15: note = C-term amino
XDXXDXXAFKXXXEA

SEQ ID NO: 544 - protein, 15 aa, synthetic construct
  SITE 1: note = N-term Acetic Acid
  SITE 1: note = (R)-2-allylpyrrolidine-2-carboxylic acid, useful for stapling/stapled with another amino acid residue comprising an olefin group to form a staple through the olefin group
  SITE 3: note = (S)-2-amino-4,4-dimethylpentanoic acid
  VARIANT 4: note = 2-amino-2-(pent-4-en-1-yl)hept-6-enoic acid, useful for stapling/stapled with another amino acid residue comprising an olefin group to form a staple through one of the two olefin groups and/or with another amino acid residue comprising an olefin group to form a staple through the other of the two olefin groups
  SITE 6: note = (S)-3-(2-amino-2-carboxyethyl)benzoic acid
  SITE 7: note = 2-amino-2-methylpropanoic acid
  SITE 10: note = L-lysine, useful for stapling/stapled with another amino acid residue comprising a side chain acid group to form a staple through the 6-amino group
  SITE 11: note (S)-3-amino-1-((pent-4-en-1-yloxy)carbonyl)pyrrolidine-3-ca rboxylic acid, useful for stapling/stapled with another amino acid residue comprising an olefin group to form a staple through the olefin group
  SITE 12: note = (S)-2-aminoheptanoic acid
  SITE 13: note = (2S,3R)-2-amino-3-(benzo[b]thiophen-3-yl)butanoic acid
  SITE 14: note = L-glutamic acid, useful for stapling/stapled with another amino acid residue comprising a side chain amino group to form a staple through the 4-carboxyl group
  SITE 15: note = C-term amino
XDXXDXXAFKXXXEA

SEQ ID NO: 545 - protein, 15 aa, synthetic construct
  SITE 1: note = N-term Acetic Acid
  SITE 1: note = (R)-2-allylpyrrolidine-2-carboxylic acid, useful for stapling/stapled with another amino acid residue comprising an olefin group to form a staple through the olefin group
  SITE 3: note = (S)-2-amino-4,4-dimethylpentanoic acid
  VARIANT 4: note = 2-amino-2-(pent-4-en-1-yl)hept-6-enoic acid, useful for stapling/stapled with another amino acid residue comprising an olefin group to form a staple through one of the two olefin groups and/or with another amino acid residue comprising an olefin group to form a staple through the other of the two olefin groups
  SITE 6: note = (S)-3-(2-amino-2-carboxyethyl)benzoic acid
  SITE 7: note = 2-amino-2-methylpropanoic acid
  SITE 10: note = L-lysine, useful for stapling/stapled with another amino acid residue comprising a side chain acid group to form a staple through the 6-amino group
  SITE 11: note (S)-3-amino-1-((pent-4-en-1-yloxy)carbonyl)pyrrolidine-3-ca rboxylic acid, useful for stapling/stapled with another amino acid residue comprising an olefin group to form a staple through the olefin group
  SITE 12: note = (S)-2-aminoheptanoic acid
  SITE 13: note = (2S,3S)-2-amino-3-(benzo[b]thiophen-3-yl)butanoic acid
  SITE 14: note = L-glutamic acid, useful for stapling/stapled with another amino acid residue comprising a side chain amino group to form a staple through the 4-carboxyl group
  SITE 15: note = C-term amino
XDXXDXXAFKXXXEA

SEQ ID NO: 546 - protein, 15 aa, synthetic construct
  SITE 1: note = N-term Acetic Acid
  SITE 1: note = (R)-2-allylpyrrolidine-2-carboxylic acid, useful for stapling/stapled with another amino acid residue comprising an olefin group to form a staple through the olefin group
  SITE 3: note = (S)-2-amino-4,4-dimethylpentanoic acid
  VARIANT 4: note = 2-amino-2-(pent-4-en-1-yl)hept-6-enoic acid, useful for stapling/stapled with another amino acid residue comprising an olefin group to form a staple through one of the two olefin groups and/or with another amino acid residue comprising an olefin group to form a staple through the other of the two olefin groups
  SITE 6: note = (S)-3-(2-amino-2-carboxyethyl)benzoic acid
  SITE 7: note = 2-amino-2-methylpropanoic acid
  SITE 10: note = L-lysine, useful for stapling/stapled with another amino acid residue comprising a side chain acid group to form a staple through the 6-amino group
  SITE 11: note (S)-3-amino-1-((pent-4-en-1-yloxy)carbonyl)pyrrolidine-3-ca rboxylic acid, useful for stapling/stapled with another amino acid residue comprising an olefin group to form a staple through the olefin group
  SITE 12: note = (S)-2-aminoheptanoic acid
  SITE 13: note = (S)-2-amino-3-(2,3-dihydro-1H-inden-5-yl)propanoic acid
  SITE 14: note = L-glutamic acid, useful for stapling/stapled with another amino acid residue comprising a side chain amino group to form a staple through the 4-carboxyl group
  SITE 15: note = C-term amino
XDXXDXXAFKXXXEA

SEQ ID NO: 547 - protein, 15 aa, synthetic construct
  SITE 1: note = N-term Acetic Acid
  SITE 1: note = (R)-2-allylpyrrolidine-2-carboxylic acid, useful for stapling/stapled with another amino acid residue comprising an olefin group to form a staple through the olefin group
  SITE 3: note = (S)-2-amino-4,4-dimethylpentanoic acid
  VARIANT 4: note = 2-amino-2-(pent-4-en-1-yl)hept-6-enoic acid, useful for stapling/stapled with another amino acid residue comprising an olefin group to form a staple through one of the two olefin groups and/or with another amino acid residue comprising an olefin group to form a staple through the other of the two olefin groups
  SITE 6: note = (S)-3-(2-amino-2-carboxyethyl)benzoic acid
  SITE 10: note = L-lysine, useful for stapling/stapled with another amino acid residue comprising a side chain acid group to form a staple through the 6-amino group
  SITE 11: note 4-amino-1-((pent-4-en-1-yloxy)carbonyl)piperidine-4-carboxy lic acid, useful for stapling/stapled with another amino acid residue comprising an olefin group to form a staple through the olefin group
  SITE 12: note = (S)-2-amino-3-(2-(trifluoromethyl)phenyl)propanoic acid
  SITE 13: note = (S)-2-amino-3-(benzo[b]thiophen-3-yl)propanoic acid
  SITE 14: note = L-glutamic acid, useful for stapling/stapled with another amino acid residue comprising a side chain amino group to form a staple through the 4-carboxyl group
  SITE 15: note = C-term amino
XDXXDXAAFKXXXEA

SEQ ID NO: 548 - protein, 15 aa, synthetic construct
  SITE 1: note = N-term Acetic Acid
  SITE 1: note = (R)-2-allylpyrrolidine-2-carboxylic acid, useful for stapling/stapled with another amino acid residue comprising an olefin group to form a staple through the olefin group
  SITE 3: note = (S)-2-amino-4,4-dimethylpentanoic acid
  VARIANT 4: note = 2-amino-2-(pent-4-en-1-yl)hept-6-enoic acid, useful for stapling/stapled with another amino acid residue comprising an olefin group to form a staple through one of the two olefin groups and/or with another amino acid residue comprising an olefin group to form a staple through the other of the two olefin groups
  SITE 6: note = (S)-3-(2-amino-2-carboxyethyl)benzoic acid
  SITE 10: note = L-lysine, useful for stapling/stapled with another amino acid residue comprising a side chain acid group to form a staple through the 6-amino group
  SITE 11: note 4-amino-1-((hex-5-en-1-yloxy)carbonyl)piperidine-4-carboxyl ic acid, useful for stapling/stapled with another amino acid residue comprising an olefin group to form a staple through the olefin group
  SITE 12: note = (S)-2-amino-3-(2-(trifluoromethyl)phenyl)propanoic acid
  SITE 13: note = (S)-2-amino-3-(benzo[b]thiophen-3-yl)propanoic acid
  SITE 14: note = L-glutamic acid, useful for stapling/stapled with another amino acid residue comprising a side chain amino group to form a staple through the 4-carboxyl group
  SITE 15: note = C-term amino
XDXXDXAAFKXXXEA

SEQ ID NO: 549 - protein, 15 aa, synthetic construct
  SITE 1: note = N-term Acetic Acid
  SITE 1: note = (R)-2-allylpyrrolidine-2-carboxylic acid, useful for stapling/stapled with another amino acid residue comprising an olefin group to form a staple through the olefin group
  SITE 3: note = (S)-2-amino-4,4-dimethylpentanoic acid
  VARIANT 4: note = 2-amino-2-(pent-4-en-1-yl)hept-6-enoic acid, useful for stapling/stapled with another amino acid residue comprising an olefin group to form a staple through one of the two olefin groups and/or with another amino acid residue comprising an olefin group to form a staple through the other of the two olefin groups
  SITE 6: note = (S)-3-(2-amino-2-carboxyethyl)benzoic acid
  SITE 10: note = L-lysine, useful for stapling/stapled with another amino acid residue comprising a side chain acid group to form a staple through the 6-amino group
  SITE 11: note 4-amino-1-((pent-4-en-1-yloxy)carbonyl)piperidine-4-carboxy lic acid, useful for stapling/stapled with another amino acid residue comprising an olefin group to form a staple through the olefin group
  SITE 12: note = (S)-2-amino-3-(thiophen-3-yl)propanoic acid
  SITE 13: note = (S)-2-amino-3-(benzo[b]thiophen-3-yl)propanoic acid
  SITE 14: note = L-glutamic acid, useful for stapling/stapled with another amino acid residue comprising a side chain amino group to form a staple through the 4-carboxyl group
  SITE 15: note = C-term amino
XDXXDXAAFKXXXEA

SEQ ID NO: 550 - protein, 15 aa, synthetic construct
  SITE 1: note = N-term Acetic Acid
  SITE 1: note = (R)-2-allylpyrrolidine-2-carboxylic acid, useful for stapling/stapled with another amino acid residue comprising an olefin group to form a staple through the olefin group
  SITE 3: note = (S)-2-amino-4,4-dimethylpentanoic acid
  VARIANT 4: note = 2-amino-2-(pent-4-en-1-yl)hept-6-enoic acid, useful for stapling/stapled with another amino acid residue comprising an olefin group to form a staple through one of the two olefin groups and/or with another amino acid residue comprising an olefin group to form a staple through the other of the two olefin groups
  SITE 6: note = (S)-3-(2-amino-2-carboxyethyl)benzoic acid
  SITE 10: note = L-lysine, useful for stapling/stapled with another amino acid residue comprising a side chain acid group to form a staple through the 6-amino group
  SITE 11: note 4-amino-1-((hex-5-en-1-yloxy)carbonyl)piperidine-4-carboxyl ic acid, useful for stapling/stapled with another amino acid residue comprising an olefin group to form a staple through the olefin group
  SITE 12: note = (S)-2-amino-3-(thiophen-3-yl)propanoic acid
  SITE 13: note = (S)-2-amino-3-(benzo[b]thiophen-3-yl)propanoic acid
  SITE 14: note = L-glutamic acid, useful for stapling/stapled with another amino acid residue comprising a side chain amino group to form a staple through the 4-carboxyl group
  SITE 15: note = C-term amino
XDXXDXAAFKXXXEA

SEQ ID NO: 551 - protein, 17 aa, synthetic construct
  SITE 1: note = N-term Acetic Acid
  SITE 1: note = (R)-2-allylpyrrolidine-2-carboxylic acid, useful for stapling/stapled with another amino acid residue comprising an olefin group to form a staple through the olefin group
  SITE 3: note = (S)-2-amino-4,4-dimethylpentanoic acid
  VARIANT 4: note = 2-amino-2-(pent-4-en-1-yl)hept-6-enoic acid, useful for stapling/stapled with another amino acid residue comprising an olefin group to form a staple through one of the two olefin groups and/or with another amino acid residue comprising an olefin group to form a staple through the other of the two olefin groups
  SITE 6: note = (S)-3-(2-amino-2-carboxyethyl)benzoic acid
  SITE 7: note = 2-amino-2-methylpropanoic acid
  SITE 10: note = L-lysine, useful for stapling/stapled with another amino acid residue comprising a side chain acid group to form a staple through the 6-amino group
  SITE 11: note (S)-3-amino-1-((pent-4-en-1-yloxy)carbonyl)pyrrolidine-3-ca rboxylic acid, useful for stapling/stapled with another amino acid residue comprising an olefin group to form a staple through the olefin group
  SITE 12: note = (S)-2-amino-3-(thiophen-3-yl)propanoic acid
  SITE 13: note = (S)-2-amino-3-(benzo[b]thiophen-3-yl)propanoic acid
  SITE 14: note = L-glutamic acid, useful for stapling/stapled with another amino acid residue comprising a side chain amino group to form a staple through the 4-carboxyl group
  SITE 17: note = C-term amino
XDXXDXXAFKXXXEAAA

SEQ ID NO: 552 - protein, 19 aa, synthetic construct
  SITE 1: note = N-term Acetic Acid
  SITE 1: note = (R)-2-allylpyrrolidine-2-carboxylic acid, useful for stapling/stapled with another amino acid residue comprising an olefin group to form a staple through the olefin group
  SITE 3: note = (S)-2-amino-4,4-dimethylpentanoic acid
  VARIANT 4: note = 2-amino-2-(pent-4-en-1-yl)hept-6-enoic acid, useful for stapling/stapled with another amino acid residue comprising an olefin group to form a staple through one of the two olefin groups and/or with another amino acid residue comprising an olefin group to form a staple through the other of the two olefin groups
  SITE 6: note = (S)-3-(2-amino-2-carboxyethyl)benzoic acid
  SITE 7: note = 2-amino-2-methylpropanoic acid
  SITE 10: note = L-lysine, useful for stapling/stapled with another amino acid residue comprising a side chain acid group to form a staple through the 6-amino group
  SITE 11: note (S)-3-amino-1-((pent-4-en-1-yloxy)carbonyl)pyrrolidine-3-ca rboxylic acid, useful for stapling/stapled with another amino acid residue comprising an olefin group to form a staple through the olefin group
  SITE 12: note = (S)-2-amino-3-(thiophen-3-yl)propanoic acid
  SITE 13: note = (S)-2-amino-3-(benzo[b]thiophen-3-yl)propanoic acid
  SITE 14: note = L-glutamic acid, useful for stapling/stapled with another amino acid residue comprising a side chain amino group to form a staple through the 4-carboxyl group
  SITE 19: note = C-term amino
XDXXDXXAFKXXXEAAAAA

SEQ ID NO: 553 - protein, 21 aa, synthetic construct
  SITE 1: note = N-term Acetic Acid
  SITE 1: note = (R)-2-allylpyrrolidine-2-carboxylic acid, useful for stapling/stapled with another amino acid residue comprising an olefin group to form a staple through the olefin group
  SITE 3: note = (S)-2-amino-4,4-dimethylpentanoic acid
  VARIANT 4: note = 2-amino-2-(pent-4-en-1-yl)hept-6-enoic acid, useful for stapling/stapled with another amino acid residue comprising an olefin group to form a staple through one of the two olefin groups and/or with another amino acid residue comprising an olefin group to form a staple through the other of the two olefin groups
  SITE 6: note = (S)-3-(2-amino-2-carboxyethyl)benzoic acid
  SITE 7: note = 2-amino-2-methylpropanoic acid
  SITE 10: note = L-lysine, useful for stapling/stapled with another amino acid residue comprising a side chain acid group to form a staple through the 6-amino group
  SITE 11: note (S)-3-amino-1-((pent-4-en-1-yloxy)carbonyl)pyrrolidine-3-ca rboxylic acid, useful for stapling/stapled with another amino acid residue comprising an olefin group to form a staple through the olefin group
  SITE 12: note = (S)-2-amino-3-(thiophen-3-yl)propanoic acid
  SITE 13: note = (S)-2-amino-3-(benzo[b]thiophen-3-yl)propanoic acid
  SITE 14: note = L-glutamic acid, useful for stapling/stapled with another amino acid residue comprising a side chain amino group to form a staple through the 4-carboxyl group
  SITE 21: note = C-term amino
XDXXDXXAFKXXXEAAAAAAA

SEQ ID NO: 554 - protein, 16 aa, synthetic construct
  SITE 1: note = N-term Acetic Acid
  SITE 1: note = (R)-2-allylpyrrolidine-2-carboxylic acid, useful for stapling/stapled with another amino acid residue comprising an olefin group to form a staple through the olefin group
  SITE 3: note = (S)-2-amino-4,4-dimethylpentanoic acid
  VARIANT 4: note = 2-amino-2-(pent-4-en-1-yl)hept-6-enoic acid, useful for stapling/stapled with another amino acid residue comprising an olefin group to form a staple through one of the two olefin groups and/or with another amino acid residue comprising an olefin group to form a staple through the other of the two olefin groups
  SITE 6: note = (S)-3-(2-amino-2-carboxyethyl)benzoic acid
  SITE 7: note = 2-amino-2-methylpropanoic acid
  SITE 10: note = L-lysine, useful for stapling/stapled with another amino acid residue comprising a side chain acid group to form a staple through the 6-amino group
  SITE 11: note (S)-3-amino-1-((pent-4-en-1-yloxy)carbonyl)pyrrolidine-3-ca rboxylic acid, useful for stapling/stapled with another amino acid residue comprising an olefin group to form a staple through the olefin group
  SITE 12: note = (S)-2-amino-3-(thiophen-3-yl)propanoic acid
  SITE 13: note = (S)-2-amino-3-(benzo[b]thiophen-3-yl)propanoic acid
  SITE 14: note = L-glutamic acid, useful for stapling/stapled with another amino acid residue comprising a side chain amino group to form a staple through the 4-carboxyl group
  SITE 16: note = C-term amino
XDXXDXXAFKXXXELS

SEQ ID NO: 555 - protein, 14 aa, synthetic construct
  SITE 1: note = N-term Acetic Acid
  SITE 1: note = (R)-2-allylpyrrolidine-2-carboxylic acid, useful for stapling/stapled with another amino acid residue comprising an olefin group to form a staple through the olefin group
  SITE 3: note = (S)-2-amino-4,4-dimethylpentanoic acid
  VARIANT 4: note = 2-amino-2-(pent-4-en-1-yl)hept-6-enoic acid, useful for stapling/stapled with another amino acid residue comprising an olefin group to form a staple through one of the two olefin groups and/or with another amino acid residue comprising an olefin group to form a staple through the other of the two olefin groups
  SITE 6: note = (S)-3-(2-amino-2-carboxyethyl)benzoic acid
  SITE 7: note = 2-amino-2-methylpropanoic acid
  SITE 10: note = L-lysine, useful for stapling/stapled with another amino acid residue comprising a side chain acid group to form a staple through the 6-amino group
  SITE 11: note (S)-3-amino-1-((pent-4-en-1-yloxy)carbonyl)pyrrolidine-3-ca rboxylic acid, useful for stapling/stapled with another amino acid residue comprising an olefin group to form a staple through the olefin group
  SITE 12: note = (S)-2-amino-3-(thiophen-3-yl)propanoic acid
  SITE 13: note = (S)-2-amino-3-(benzo[b]thiophen-3-yl)propanoic acid
  SITE 14: note = (S)-2-aminohexanedioic acid, useful for stapling/stapled with another amino acid residue comprising a side chain amino group to form a staple through the 5-carboxyl group
  SITE 14: note = C-term amino
XDXXDXXAFKXXXX

SEQ ID NO: 556 - protein, 15 aa, synthetic construct
  SITE 1: note = N-term Acetic Acid
  SITE 1: note = (R)-2-allylpyrrolidine-2-carboxylic acid, useful for stapling/stapled with another amino acid residue comprising an olefin group to form a staple through the olefin group
  SITE 3: note = (S)-2-amino-4,4-dimethylpentanoic acid
  VARIANT 4: note = 2-amino-2-(pent-4-en-1-yl)hept-6-enoic acid, useful for stapling/stapled with another amino acid residue comprising an olefin group to form a staple through one of the two olefin groups and/or with another amino acid residue comprising an olefin group to form a staple through the other of the two olefin groups
  SITE 6: note = (S)-3-(2-amino-2-carboxyethyl)benzoic acid
  SITE 7: note = 2-amino-2-methylpropanoic acid
  SITE 10: note = L-lysine, useful for stapling/stapled with another amino acid residue comprising a side chain acid group to form a staple through the 6-amino group
  SITE 11: note (S)-3-amino-1-((pent-4-en-1-yloxy)carbonyl)pyrrolidine-3-ca rboxylic acid, useful for stapling/stapled with another amino acid residue comprising an olefin group to form a staple through the olefin group
  SITE 12: note = (S)-2-amino-3-(thiophen-3-yl)propanoic acid
  SITE 13: note = (S)-2-amino-3-(benzo[b]thiophen-3-yl)propanoic acid
  SITE 14: note = (S)-2-aminohexanedioic acid, useful for stapling/stapled with another amino acid residue comprising a side chain amino group to form a staple through the 5-carboxyl group
  SITE 15: note = C-term amino
XDXXDXXAFKXXXXA

SEQ ID NO: 557 - protein, 14 aa, synthetic construct
  SITE 1: note = N-term Acetic Acid
  SITE 1: note = (R)-2-allylpyrrolidine-2-carboxylic acid, useful for stapling/stapled with another amino acid residue comprising an olefin group to form a staple through the olefin group
  SITE 3: note = (S)-2-amino-4,4-dimethylpentanoic acid
  VARIANT 4: note = 2-amino-2-(pent-4-en-1-yl)hept-6-enoic acid, useful for stapling/stapled with another amino acid residue comprising an olefin group to form a staple through one of the two olefin groups and/or with another amino acid residue comprising an olefin group to form a staple through the other of the two olefin groups
  SITE 6: note = (S)-3-(2-amino-2-carboxyethyl)benzoic acid
  SITE 7: note = 2-amino-2-methylpropanoic acid
  SITE 10: note = (R)-2,4-diaminobutanoic acid, useful for stapling/stapled with another amino acid residue comprising a side chain acid group to form a staple through the 4-amino group
  SITE 11: note (S)-3-amino-1-((pent-4-en-1-yloxy)carbonyl)pyrrolidine-3-ca rboxylic acid, useful for stapling/stapled with another amino acid residue comprising an olefin group to form a staple through the olefin group
  SITE 12: note = (S)-2-amino-3-(thiophen-3-yl)propanoic acid
  SITE 13: note = (S)-2-amino-3-(benzo[b]thiophen-3-yl)propanoic acid
  SITE 14: note = L-glutamic acid, useful for stapling/stapled with another amino acid residue comprising a side chain amino group to form a staple through the 4-carboxyl group
  SITE 14: note = C-term amino
XDXXDXXAFXXXXE

SEQ ID NO: 558 - protein, 17 aa, synthetic construct
  SITE 1: note = N-term Acetic Acid
  SITE 1: note = (R)-2-allylpyrrolidine-2-carboxylic acid, useful for stapling/stapled with another amino acid residue comprising an olefin group to form a staple through the olefin group
  SITE 3: note = (S)-2-amino-4,4-dimethylpentanoic acid
  VARIANT 4: note = 2-amino-2-(pent-4-en-1-yl)hept-6-enoic acid, useful for stapling/stapled with another amino acid residue comprising an olefin group to form a staple through one of the two olefin groups and/or with another amino acid residue comprising an olefin group to form a staple through the other of the two olefin groups
  SITE 6: note = (S)-3-(2-amino-2-carboxyethyl)benzoic acid
  SITE 7: note = 2-amino-2-methylpropanoic acid
  SITE 10: note = (R)-2,4-diaminobutanoic acid, useful for stapling/stapled with another amino acid residue comprising a side chain acid group to form a staple through the 4-amino group
  SITE 11: note (S)-3-amino-1-((pent-4-en-1-yloxy)carbonyl)pyrrolidine-3-ca rboxylic acid, useful for stapling/stapled with another amino acid residue comprising an olefin group to form a staple through the olefin group
  SITE 12: note = (S)-2-amino-3-(thiophen-3-yl)propanoic acid
  SITE 13: note = (S)-2-amino-3-(benzo[b]thiophen-3-yl)propanoic acid
  SITE 14: note = L-glutamic acid, useful for stapling/stapled with another amino acid residue comprising a side chain amino group to form a staple through the 4-carboxyl group
  SITE 17: note = C-term amino
XDXXDXXAFXXXXEAAA

SEQ ID NO: 559 - protein, 19 aa, synthetic construct
  SITE 1: note = N-term Acetic Acid
  SITE 1: note = (R)-2-allylpyrrolidine-2-carboxylic acid, useful for stapling/stapled with another amino acid residue comprising an olefin group to form a staple through the olefin group
  SITE 3: note = (S)-2-amino-4,4-dimethylpentanoic acid
  VARIANT 4: note = 2-amino-2-(pent-4-en-1-yl)hept-6-enoic acid, useful for stapling/stapled with another amino acid residue comprising an olefin group to form a staple through one of the two olefin groups and/or with another amino acid residue comprising an olefin group to form a staple through the other of the two olefin groups
  SITE 6: note = (S)-3-(2-amino-2-carboxyethyl)benzoic acid
  SITE 7: note = 2-amino-2-methylpropanoic acid
  SITE 10: note = (R)-2,4-diaminobutanoic acid, useful for stapling/stapled with another amino acid residue comprising a side chain acid group to form a staple through the 4-amino group
  SITE 11: note (S)-3-amino-1-((pent-4-en-1-yloxy)carbonyl)pyrrolidine-3-ca rboxylic acid, useful for stapling/stapled with another amino acid residue comprising an olefin group to form a staple through the olefin group
  SITE 12: note = (S)-2-amino-3-(thiophen-3-yl)propanoic acid
  SITE 13: note = (S)-2-amino-3-(benzo[b]thiophen-3-yl)propanoic acid
  SITE 14: note = L-glutamic acid, useful for stapling/stapled with another amino acid residue comprising a side chain amino group to form a staple through the 4-carboxyl group
  SITE 19: note = C-term amino
XDXXDXXAFXXXXEAAAAA

SEQ ID NO: 560 - protein, 16 aa, synthetic construct
  SITE 1: note = N-term Acetic Acid
  SITE 1: note = (R)-2-allylpyrrolidine-2-carboxylic acid, useful for stapling/stapled with another amino acid residue comprising an olefin group to form a staple through the olefin group
  SITE 3: note = (S)-2-amino-4,4-dimethylpentanoic acid
  VARIANT 4: note = 2-amino-2-(pent-4-en-1-yl)hept-6-enoic acid, useful for stapling/stapled with another amino acid residue comprising an olefin group to form a staple through one of the two olefin groups and/or with another amino acid residue comprising an olefin group to form a staple through the other of the two olefin groups
  SITE 6: note = (S)-3-(2-amino-2-carboxyethyl)benzoic acid
  SITE 7: note = 2-amino-2-methylpropanoic acid
  SITE 10: note = (R)-2,4-diaminobutanoic acid, useful for stapling/stapled with another amino acid residue comprising a side chain acid group to form a staple through the 4-amino group
  SITE 11: note (S)-3-amino-1-((pent-4-en-1-yloxy)carbonyl)pyrrolidine-3-ca rboxylic acid, useful for stapling/stapled with another amino acid residue comprising an olefin group to form a staple through the olefin group
  SITE 12: note = (S)-2-amino-3-(thiophen-3-yl)propanoic acid
  SITE 13: note = (S)-2-amino-3-(benzo[b]thiophen-3-yl)propanoic acid
  SITE 14: note = L-glutamic acid, useful for stapling/stapled with another amino acid residue comprising a side chain amino group to form a staple through the 4-carboxyl group
  SITE 16: note = C-term amino
XDXXDXXAFXXXXELS

SEQ ID NO: 561 - protein, 14 aa, synthetic construct
  SITE 1: note = N-term Acetic Acid
  SITE 1: note = (R)-2-allylpyrrolidine-2-carboxylic acid, useful for stapling/stapled with another amino acid residue comprising an olefin group to form a staple through the olefin group
  SITE 3: note = (S)-2-amino-4,4-dimethylpentanoic acid
  VARIANT 4: note = 2-amino-2-(pent-4-en-1-yl)hept-6-enoic acid, useful for stapling/stapled with another amino acid residue comprising an olefin group to form a staple through one of the two olefin groups and/or with another amino acid residue comprising an olefin group to form a staple through the other of the two olefin groups
  SITE 6: note = (S)-3-(2-amino-2-carboxyethyl)benzoic acid
  SITE 7: note = 2-amino-2-methylpropanoic acid
  SITE 10: note = (R)-2,5-diaminopentanoic acid, useful for stapling/stapled with another amino acid residue comprising a side chain acid group to form a staple through the 5-amino group
  SITE 11: note (S)-3-amino-1-((pent-4-en-1-yloxy)carbonyl)pyrrolidine-3-ca rboxylic acid, useful for stapling/stapled with another amino acid residue comprising an olefin group to form a staple through the olefin group
  SITE 12: note = (S)-2-amino-3-(thiophen-3-yl)propanoic acid
  SITE 13: note = (S)-2-amino-3-(benzo[b]thiophen-3-yl)propanoic acid
  SITE 14: note = L-aspartic acid, useful for stapling/stapled with another amino acid residue comprising a side chain amino group to form a staple through the acid group in the side chain
  SITE 14: note = C-term amino
XDXXDXXAFXXXXD

SEQ ID NO: 562 - protein, 15 aa, synthetic construct
  SITE 1: note = N-term Acetic Acid
  SITE 1: note = (R)-2-allylpyrrolidine-2-carboxylic acid, useful for stapling/stapled with another amino acid residue comprising an olefin group to form a staple through the olefin group
  SITE 3: note = (S)-2-amino-4,4-dimethylpentanoic acid
  VARIANT 4: note = 2-amino-2-(pent-4-en-1-yl)hept-6-enoic acid, useful for stapling/stapled with another amino acid residue comprising an olefin group to form a staple through one of the two olefin groups and/or with another amino acid residue comprising an olefin group to form a staple through the other of the two olefin groups
  SITE 6: note = (S)-3-(2-amino-2-carboxyethyl)benzoic acid
  SITE 7: note = 2-amino-2-methylpropanoic acid
  SITE 10: note = (R)-2,5-diaminopentanoic acid, useful for stapling/stapled with another amino acid residue comprising a side chain acid group to form a staple through the 5-amino group
  SITE 11: note (S)-3-amino-1-((pent-4-en-1-yloxy)carbonyl)pyrrolidine-3-ca rboxylic acid, useful for stapling/stapled with another amino acid residue comprising an olefin group to form a staple through the olefin group
  SITE 12: note = (S)-2-amino-3-(thiophen-3-yl)propanoic acid
  SITE 13: note = (S)-2-amino-3-(benzo[b]thiophen-3-yl)propanoic acid
  SITE 14: note = L-aspartic acid, useful for stapling/stapled with another amino acid residue comprising a side chain amino group to form a staple through the acid group in the side chain
  SITE 15: note = C-term amino
XDXXDXXAFXXXXDA

SEQ ID NO: 563 - protein, 17 aa, synthetic construct
  SITE 1: note = N-term Acetic Acid
  SITE 1: note = (R)-2-allylpyrrolidine-2-carboxylic acid, useful for stapling/stapled with another amino acid residue comprising an olefin group to form a staple through the olefin group
  SITE 3: note = (S)-2-amino-4,4-dimethylpentanoic acid
  VARIANT 4: note = 2-amino-2-(pent-4-en-1-yl)hept-6-enoic acid, useful for stapling/stapled with another amino acid residue comprising an olefin group to form a staple through one of the two olefin groups and/or with another amino acid residue comprising an olefin group to form a staple through the other of the two olefin groups
  SITE 6: note = (S)-3-(2-amino-2-carboxyethyl)benzoic acid
  SITE 7: note = 2-amino-2-methylpropanoic acid
  SITE 10: note = (R)-2,5-diaminopentanoic acid, useful for stapling/stapled with another amino acid residue comprising a side chain acid group to form a staple through the 5-amino group
  SITE 11: note (S)-3-amino-1-((pent-4-en-1-yloxy)carbonyl)pyrrolidine-3-ca rboxylic acid, useful for stapling/stapled with another amino acid residue comprising an olefin group to form a staple through the olefin group
  SITE 12: note = (S)-2-amino-3-(thiophen-3-yl)propanoic acid
  SITE 13: note = (S)-2-amino-3-(benzo[b]thiophen-3-yl)propanoic acid
  SITE 14: note = L-aspartic acid, useful for stapling/stapled with another amino acid residue comprising a side chain amino group to form a staple through the acid group in the side chain
  SITE 17: note = C-term amino
XDXXDXXAFXXXXDAAA

SEQ ID NO: 564 - protein, 16 aa, synthetic construct
  SITE 1: note = N-term Acetic Acid
  SITE 1: note = (R)-2-allylpyrrolidine-2-carboxylic acid, useful for stapling/stapled with another amino acid residue comprising an olefin group to form a staple through the olefin group
  SITE 3: note = (S)-2-amino-4,4-dimethylpentanoic acid
  VARIANT 4: note = 2-amino-2-(pent-4-en-1-yl)hept-6-enoic acid, useful for stapling/stapled with another amino acid residue comprising an olefin group to form a staple through one of the two olefin groups and/or with another amino acid residue comprising an olefin group to form a staple through the other of the two olefin groups
  SITE 6: note = (S)-3-(2-amino-2-carboxyethyl)benzoic acid
  SITE 7: note = 2-amino-2-methylpropanoic acid
  SITE 10: note = (R)-2,5-diaminopentanoic acid, useful for stapling/stapled with another amino acid residue comprising a side chain acid group to form a staple through the 5-amino group
  SITE 11: note (S)-3-amino-1-((pent-4-en-1-yloxy)carbonyl)pyrrolidine-3-ca rboxylic acid, useful for stapling/stapled with another amino acid residue comprising an olefin group to form a staple through the olefin group
  SITE 12: note = (S)-2-amino-3-(thiophen-3-yl)propanoic acid
  SITE 13: note = (S)-2-amino-3-(benzo[b]thiophen-3-yl)propanoic acid
  SITE 14: note = L-aspartic acid, useful for stapling/stapled with another amino acid residue comprising a side chain amino group to form a staple through the acid group in the side chain
  SITE 16: note = C-term amino
XDXXDXXAFXXXXDLS

SEQ ID NO: 565 - protein, 15 aa, synthetic construct
  SITE 1: note = N-term isobutyric acid
  SITE 1: note = (R)-2-allylpyrrolidine-2-carboxylic acid, useful for stapling/stapled with another amino acid residue comprising an olefin group to form a staple through the olefin group
  SITE 3: note = (S)-2-amino-4,4-dimethylpentanoic acid
  VARIANT 4: note = 2-amino-2-(pent-4-en-1-yl)hept-6-enoic acid, useful for stapling/stapled with another amino acid residue comprising an olefin group to form a staple through one of the two olefin groups and/or with another amino acid residue comprising an olefin group to form a staple through the other of the two olefin groups
  SITE 6: note = (S)-3-(2-amino-2-carboxyethyl)benzoic acid
  SITE 7: note = 2-amino-2-methylpropanoic acid
  SITE 10: note = L-lysine, useful for stapling/stapled with another amino acid residue comprising a side chain acid group to form a staple through the 6-amino group
  SITE 11: note (S)-3-amino-1-((pent-4-en-1-yloxy)carbonyl)pyrrolidine-3-ca rboxylic acid, useful for stapling/stapled with another amino acid residue comprising an olefin group to form a staple through the olefin group
  SITE 12: note = (S)-2-amino-3-(thiophen-3-yl)propanoic acid
  SITE 13: note = (S)-2-amino-3-(benzo[b]thiophen-3-yl)propanoic acid
  SITE 14: note = L-glutamic acid, useful for stapling/stapled with another amino acid residue comprising a side chain amino group to form a staple through the 4-carboxyl group
  SITE 15: note = C-term amino
XDXXDXXAFKXXXEA

SEQ ID NO: 566 - protein, 15 aa, synthetic construct
  SITE 1: note = N-term 3-methylbutanoic acid
  SITE 1: note = (R)-2-allylpyrrolidine-2-carboxylic acid, useful for stapling/stapled with another amino acid residue comprising an olefin group to form a staple through the olefin group
  SITE 3: note = (S)-2-amino-4,4-dimethylpentanoic acid
  VARIANT 4: note = 2-amino-2-(pent-4-en-1-yl)hept-6-enoic acid, useful for stapling/stapled with another amino acid residue comprising an olefin group to form a staple through one of the two olefin groups and/or with another amino acid residue comprising an olefin group to form a staple through the other of the two olefin groups
  SITE 6: note = (S)-3-(2-amino-2-carboxyethyl)benzoic acid
  SITE 7: note = 2-amino-2-methylpropanoic acid
  SITE 10: note = L-lysine, useful for stapling/stapled with another amino acid residue comprising a side chain acid group to form a staple through the 6-amino group
  SITE 11: note (S)-3-amino-1-((pent-4-en-1-yloxy)carbonyl)pyrrolidine-3-ca rboxylic acid, useful for stapling/stapled with another amino acid residue comprising an olefin group to form a staple through the olefin group
  SITE 12: note = (S)-2-amino-3-(thiophen-3-yl)propanoic acid
  SITE 13: note = (S)-2-amino-3-(benzo[b]thiophen-3-yl)propanoic acid
  SITE 14: note = L-glutamic acid, useful for stapling/stapled with another amino acid residue comprising a side chain amino group to form a staple through the 4-carboxyl group
  SITE 15: note = C-term amino
XDXXDXXAFKXXXEA

SEQ ID NO: 567 - protein, 15 aa, synthetic construct
  SITE 1: note = N-term propionamide
  SITE 1: note = (R)-2-allylpyrrolidine-2-carboxylic acid, useful for stapling/stapled with another amino acid residue comprising an olefin group to form a staple through the olefin group
  SITE 3: note = (S)-2-amino-4,4-dimethylpentanoic acid
  VARIANT 4: note = 2-amino-2-(pent-4-en-1-yl)hept-6-enoic acid, useful for stapling/stapled with another amino acid residue comprising an olefin group to form a staple through one of the two olefin groups and/or with another amino acid residue comprising an olefin group to form a staple through the other of the two olefin groups
  SITE 6: note = (S)-3-(2-amino-2-carboxyethyl)benzoic acid
  SITE 7: note = 2-amino-2-methylpropanoic acid
  SITE 10: note = L-lysine, useful for stapling/stapled with another amino acid residue comprising a side chain acid group to form a staple through the 6-amino group
  SITE 11: note (S)-3-amino-1-((pent-4-en-1-yloxy)carbonyl)pyrrolidine-3-ca rboxylic acid, useful for stapling/stapled with another amino acid residue comprising an olefin group to form a staple through the olefin group
  SITE 12: note = (S)-2-amino-3-(thiophen-3-yl)propanoic acid
  SITE 13: note = (S)-2-amino-3-(benzo[b]thiophen-3-yl)propanoic acid
  SITE 14: note = L-glutamic acid, useful for stapling/stapled with another amino acid residue comprising a side chain amino group to form a staple through the 4-carboxyl group
  SITE 15: note = C-term amino
XDXXDXXAFKXXXEA

SEQ ID NO: 568 - protein, 15 aa, synthetic construct
  SITE 1: note = N-term Acetic Acid
  SITE 1: note = (R)-2-allylpyrrolidine-2-carboxylic acid, useful for stapling/stapled with another amino acid residue comprising an olefin group to form a staple through the olefin group
  SITE 3: note = (S)-2-amino-4,4-dimethylpentanoic acid
  VARIANT 4: note = 2-amino-2-(pent-4-en-1-yl)hept-6-enoic acid, useful for stapling/stapled with another amino acid residue comprising an olefin group to form a staple through one of the two olefin groups and/or with another amino acid residue comprising an olefin group to form a staple through the other of the two olefin groups
  SITE 6: note = (S)-3-(2-amino-2-carboxyethyl)benzoic acid
  SITE 7: note = 2-amino-2-methylpropanoic acid
  SITE 8: note = L-alanine-3,3,3-d3
  SITE 10: note = L-lysine, useful for stapling/stapled with another amino acid residue comprising a side chain acid group to form a staple through the 6-amino group
  SITE 11: note (S)-3-amino-1-((pent-4-en-1-yloxy)carbonyl)pyrrolidine-3-ca rboxylic acid, useful for stapling/stapled with another amino acid residue comprising an olefin group to form a staple through the olefin group
  SITE 12: note = (S)-2-amino-3-(thiophen-3-yl)propanoic acid
  SITE 13: note = (S)-2-amino-3-(benzo[b]thiophen-3-yl)propanoic acid
  SITE 14: note = L-glutamic acid, useful for stapling/stapled with another amino acid residue comprising a side chain amino group to form a staple through the 4-carboxyl group
  SITE 15: note = L-alanine-3,3,3-d3
  SITE 15: note = C-term amino
XDXXDXXAFKXXXEA

SEQ ID NO: 569 - protein, 17 aa, synthetic construct
  SITE 1: note = N-term Acetic Acid
  SITE 1: note = (R)-2-allylpyrrolidine-2-carboxylic acid, useful for stapling/stapled with another amino acid residue comprising an olefin group to form a staple through the olefin group
  SITE 3: note = (S)-2-amino-4,4-dimethylpentanoic acid
  VARIANT 4: note = 2-amino-2-(pent-4-en-1-yl)hept-6-enoic acid, useful for stapling/stapled with another amino acid residue comprising an olefin group to form a staple through one of the two olefin groups and/or with another amino acid residue comprising an olefin group to form a staple through the other of the two olefin groups
  SITE 6: note = (S)-3-(2-amino-2-carboxyethyl)benzoic acid
  SITE 7: note = 2-amino-2-methylpropanoic acid
  SITE 10: note = L-lysine, useful for stapling/stapled with another amino acid residue comprising a side chain acid group to form a staple through the 6-amino group
  SITE 11: note (S)-3-amino-1-((pent-4-en-1-yloxy)carbonyl)pyrrolidine-3-ca rboxylic acid, useful for stapling/stapled with another amino acid residue comprising an olefin group to form a staple through the olefin group
  SITE 12: note = (S)-2-amino-3-(thiophen-3-yl)propanoic acid
  SITE 13: note = (S)-2-amino-3-(benzo[b]thiophen-3-yl)propanoic acid
  SITE 14: note = L-glutamic acid, useful for stapling/stapled with another amino acid residue comprising a side chain amino group to form a staple through the 4-carboxyl group
  SITE 17: note = C-term amino
XDXXDXXAFKXXXEAAL

SEQ ID NO: 570 - protein, 18 aa, synthetic construct
  SITE 1: note = N-term Acetic Acid
  SITE 1: note = (R)-2-allylpyrrolidine-2-carboxylic acid, useful for stapling/stapled with another amino acid residue comprising an olefin group to form a staple through the olefin group
  SITE 3: note = (S)-2-amino-4,4-dimethylpentanoic acid
  VARIANT 4: note = 2-amino-2-(pent-4-en-1-yl)hept-6-enoic acid, useful for stapling/stapled with another amino acid residue comprising an olefin group to form a staple through one of the two olefin groups and/or with another amino acid residue comprising an olefin group to form a staple through the other of the two olefin groups
  SITE 6: note = (S)-3-(2-amino-2-carboxyethyl)benzoic acid
  SITE 7: note = 2-amino-2-methylpropanoic acid
  SITE 10: note = L-lysine, useful for stapling/stapled with another amino acid residue comprising a side chain acid group to form a staple through the 6-amino group
  SITE 11: note (S)-3-amino-1-((pent-4-en-1-yloxy)carbonyl)pyrrolidine-3-ca rboxylic acid, useful for stapling/stapled with another amino acid residue comprising an olefin group to form a staple through the olefin group
  SITE 12: note = (S)-2-amino-3-(thiophen-3-yl)propanoic acid
  SITE 13: note = (S)-2-amino-3-(benzo[b]thiophen-3-yl)propanoic acid
  SITE 14: note = L-glutamic acid, useful for stapling/stapled with another amino acid residue comprising a side chain amino group to form a staple through the 4-carboxyl group
  SITE 18: note = C-term amino
XDXXDXXAFKXXXEAALL

SEQ ID NO: 571 - protein, 18 aa, synthetic construct
  SITE 1: note = N-term Acetic Acid
  SITE 1: note = (R)-2-allylpyrrolidine-2-carboxylic acid, useful for stapling/stapled with another amino acid residue comprising an olefin group to form a staple through the olefin group
  SITE 3: note = (S)-2-amino-4,4-dimethylpentanoic acid
  VARIANT 4: note = 2-amino-2-(pent-4-en-1-yl)hept-6-enoic acid, useful for stapling/stapled with another amino acid residue comprising an olefin group to form a staple through one of the two olefin groups and/or with another amino acid residue comprising an olefin group to form a staple through the other of the two olefin groups
  SITE 6: note = (S)-3-(2-amino-2-carboxyethyl)benzoic acid
  SITE 7: note = 2-amino-2-methylpropanoic acid
  SITE 10: note = L-lysine, useful for stapling/stapled with another amino acid residue comprising a side chain acid group to form a staple through the 6-amino group
  SITE 11: note (S)-3-amino-1-((pent-4-en-1-yloxy)carbonyl)pyrrolidine-3-ca rboxylic acid, useful for stapling/stapled with another amino acid residue comprising an olefin group to form a staple through the olefin group
  SITE 12: note = (S)-2-amino-3-(thiophen-3-yl)propanoic acid
  SITE 13: note = (S)-2-amino-3-(benzo[b]thiophen-3-yl)propanoic acid
  SITE 14: note = L-glutamic acid, useful for stapling/stapled with another amino acid residue comprising a side chain amino group to form a staple through the 4-carboxyl group
  SITE 18: note = C-term amino
XDXXDXXAFKXXXEAAAL

SEQ ID NO: 572 - protein, 19 aa, synthetic construct
  SITE 1: note = N-term Acetic Acid
  SITE 1: note = (R)-2-allylpyrrolidine-2-carboxylic acid, useful for stapling/stapled with another amino acid residue comprising an olefin group to form a staple through the olefin group
  SITE 3: note = (S)-2-amino-4,4-dimethylpentanoic acid
  VARIANT 4: note = 2-amino-2-(pent-4-en-1-yl)hept-6-enoic acid, useful for stapling/stapled with another amino acid residue comprising an olefin group to form a staple through one of the two olefin groups and/or with another amino acid residue comprising an olefin group to form a staple through the other of the two olefin groups
  SITE 6: note = (S)-3-(2-amino-2-carboxyethyl)benzoic acid
  SITE 7: note = 2-amino-2-methylpropanoic acid
  SITE 10: note = L-lysine, useful for stapling/stapled with another amino acid residue comprising a side chain acid group to form a staple through the 6-amino group
  SITE 11: note (S)-3-amino-1-((pent-4-en-1-yloxy)carbonyl)pyrrolidine-3-ca rboxylic acid, useful for stapling/stapled with another amino acid residue comprising an olefin group to form a staple through the olefin group
  SITE 12: note = (S)-2-amino-3-(thiophen-3-yl)propanoic acid
  SITE 13: note = (S)-2-amino-3-(benzo[b]thiophen-3-yl)propanoic acid
  SITE 14: note = L-glutamic acid, useful for stapling/stapled with another amino acid residue comprising a side chain amino group to form a staple through the 4-carboxyl group
  SITE 19: note = C-term amino
XDXXDXXAFKXXXEAAALL

SEQ ID NO: 573 - protein, 20 aa, synthetic construct
  SITE 1: note = N-term Acetic Acid
  SITE 1: note = (R)-2-allylpyrrolidine-2-carboxylic acid, useful for stapling/stapled with another amino acid residue comprising an olefin group to form a staple through the olefin group
  SITE 3: note = (S)-2-amino-4,4-dimethylpentanoic acid
  VARIANT 4: note = 2-amino-2-(pent-4-en-1-yl)hept-6-enoic acid, useful for stapling/stapled with another amino acid residue comprising an olefin group to form a staple through one of the two olefin groups and/or with another amino acid residue comprising an olefin group to form a staple through the other of the two olefin groups
  SITE 6: note = (S)-3-(2-amino-2-carboxyethyl)benzoic acid
  SITE 7: note = 2-amino-2-methylpropanoic acid
  SITE 10: note = L-lysine, useful for stapling/stapled with another amino acid residue comprising a side chain acid group to form a staple through the 6-amino group
  SITE 11: note (S)-3-amino-1-((pent-4-en-1-yloxy)carbonyl)pyrrolidine-3-ca rboxylic acid, useful for stapling/stapled with another amino acid residue comprising an olefin group to form a staple through the olefin group
  SITE 12: note = (S)-2-amino-3-(thiophen-3-yl)propanoic acid
  SITE 13: note = (S)-2-amino-3-(benzo[b]thiophen-3-yl)propanoic acid
  SITE 14: note = L-glutamic acid, useful for stapling/stapled with another amino acid residue comprising a side chain amino group to form a staple through the 4-carboxyl group
  SITE 20: note = C-term amino
XDXXDXXAFKXXXEAAALLL

SEQ ID NO: 574 - protein, 20 aa, synthetic construct
  SITE 1: note = N-term Acetic Acid
  SITE 1: note = (R)-2-allylpyrrolidine-2-carboxylic acid, useful for stapling/stapled with another amino acid residue comprising an olefin group to form a staple through the olefin group
  SITE 3: note = (S)-2-amino-4,4-dimethylpentanoic acid
  VARIANT 4: note = 2-amino-2-(pent-4-en-1-yl)hept-6-enoic acid, useful for stapling/stapled with another amino acid residue comprising an olefin group to form a staple through one of the two olefin groups and/or with another amino acid residue comprising an olefin group to form a staple through the other of the two olefin groups
  SITE 6: note = (S)-3-(2-amino-2-carboxyethyl)benzoic acid
  SITE 7: note = 2-amino-2-methylpropanoic acid
  SITE 10: note = L-lysine, useful for stapling/stapled with another amino acid residue comprising a side chain acid group to form a staple through the 6-amino group
  SITE 11: note (S)-3-amino-1-((pent-4-en-1-yloxy)carbonyl)pyrrolidine-3-ca rboxylic acid, useful for stapling/stapled with another amino acid residue comprising an olefin group to form a staple through the olefin group
  SITE 12: note = (S)-2-amino-3-(thiophen-3-yl)propanoic acid
  SITE 13: note = (S)-2-amino-3-(benzo[b]thiophen-3-yl)propanoic acid
  SITE 14: note = L-glutamic acid, useful for stapling/stapled with another amino acid residue comprising a side chain amino group to form a staple through the 4-carboxyl group
  SITE 20: note = C-term amino
XDXXDXXAFKXXXEAVPTLK

SEQ ID NO: 575 - protein, 21 aa, synthetic construct
  SITE 1: note = N-term Acetic Acid
  SITE 1: note = (R)-2-allylpyrrolidine-2-carboxylic acid, useful for stapling/stapled with another amino acid residue comprising an olefin group to form a staple through the olefin group
  SITE 3: note = (S)-2-amino-4,4-dimethylpentanoic acid
  VARIANT 4: note = 2-amino-2-(pent-4-en-1-yl)hept-6-enoic acid, useful for stapling/stapled with another amino acid residue comprising an olefin group to form a staple through one of the two olefin groups and/or with another amino acid residue comprising an olefin group to form a staple through the other of the two olefin groups
  SITE 6: note = (S)-3-(2-amino-2-carboxyethyl)benzoic acid
  SITE 7: note = 2-amino-2-methylpropanoic acid
  SITE 10: note = L-lysine, useful for stapling/stapled with another amino acid residue comprising a side chain acid group to form a staple through the 6-amino group
  SITE 11: note (S)-3-amino-1-((pent-4-en-1-yloxy)carbonyl)pyrrolidine-3-ca rboxylic acid, useful for stapling/stapled with another amino acid residue comprising an olefin group to form a staple through the olefin group
  SITE 12: note = (S)-2-amino-3-(thiophen-3-yl)propanoic acid
  SITE 13: note = (S)-2-amino-3-(benzo[b]thiophen-3-yl)propanoic acid
  SITE 14: note = L-glutamic acid, useful for stapling/stapled with another amino acid residue comprising a side chain amino group to form a staple through the 4-carboxyl group
  SITE 21: note = C-term amino
XDXXDXXAFKXXXEAAVPTLK

SEQ ID NO: 576 - protein, 20 aa, synthetic construct
  SITE 1: note = N-term Acetic Acid
  SITE 1: note = (R)-2-allylpyrrolidine-2-carboxylic acid, useful for stapling/stapled with another amino acid residue comprising an olefin group to form a staple through the olefin group
  SITE 3: note = (S)-2-amino-4,4-dimethylpentanoic acid
  VARIANT 4: note = 2-amino-2-(pent-4-en-1-yl)hept-6-enoic acid, useful for stapling/stapled with another amino acid residue comprising an olefin group to form a staple through one of the two olefin groups and/or with another amino acid residue comprising an olefin group to form a staple through the other of the two olefin groups
  SITE 6: note = (S)-3-(2-amino-2-carboxyethyl)benzoic acid
  SITE 7: note = 2-amino-2-methylpropanoic acid
  SITE 10: note = L-lysine, useful for stapling/stapled with another amino acid residue comprising a side chain acid group to form a staple through the 6-amino group
  SITE 11: note (S)-3-amino-1-((pent-4-en-1-yloxy)carbonyl)pyrrolidine-3-ca rboxylic acid, useful for stapling/stapled with another amino acid residue comprising an olefin group to form a staple through the olefin group
  SITE 12: note = (S)-2-amino-3-(thiophen-3-yl)propanoic acid
  SITE 13: note = (S)-2-amino-3-(benzo[b]thiophen-3-yl)propanoic acid
  SITE 14: note = L-glutamic acid, useful for stapling/stapled with another amino acid residue comprising a side chain amino group to form a staple through the 4-carboxyl group
  SITE 20: note = (S)-2-aminohexanoic acid
  SITE 20: note = C-term amino
XDXXDXXAFKXXXEAKLPVX

SEQ ID NO: 577 - protein, 21 aa, synthetic construct
  SITE 1: note = N-term Acetic Acid
  SITE 1: note = (R)-2-allylpyrrolidine-2-carboxylic acid, useful for stapling/stapled with another amino acid residue comprising an olefin group to form a staple through the olefin group
  SITE 3: note = (S)-2-amino-4,4-dimethylpentanoic acid
  VARIANT 4: note = 2-amino-2-(pent-4-en-1-yl)hept-6-enoic acid, useful for stapling/stapled with another amino acid residue comprising an olefin group to form a staple through one of the two olefin groups and/or with another amino acid residue comprising an olefin group to form a staple through the other of the two olefin groups
  SITE 6: note = (S)-3-(2-amino-2-carboxyethyl)benzoic acid
  SITE 7: note = 2-amino-2-methylpropanoic acid
  SITE 10: note = L-lysine, useful for stapling/stapled with another amino acid residue comprising a side chain acid group to form a staple through the 6-amino group
  SITE 11: note (S)-3-amino-1-((pent-4-en-1-yloxy)carbonyl)pyrrolidine-3-ca rboxylic acid, useful for stapling/stapled with another amino acid residue comprising an olefin group to form a staple through the olefin group
  SITE 12: note = (S)-2-amino-3-(thiophen-3-yl)propanoic acid
  SITE 13: note = (S)-2-amino-3-(benzo[b]thiophen-3-yl)propanoic acid
  SITE 14: note = L-glutamic acid, useful for stapling/stapled with another amino acid residue comprising a side chain amino group to form a staple through the 4-carboxyl group
  SITE 21: note = (S)-2-aminohexanoic acid
  SITE 21: note = C-term amino
XDXXDXXAFKXXXEAAKLPVX

SEQ ID NO: 578 - protein, 20 aa, synthetic construct
  SITE 1: note = N-term Acetic Acid
  SITE 1: note = (R)-2-allylpyrrolidine-2-carboxylic acid, useful for stapling/stapled with another amino acid residue comprising an olefin group to form a staple through the olefin group
  SITE 3: note = (S)-2-amino-4,4-dimethylpentanoic acid
  VARIANT 4: note = 2-amino-2-(pent-4-en-1-yl)hept-6-enoic acid, useful for stapling/stapled with another amino acid residue comprising an olefin group to form a staple through one of the two olefin groups and/or with another amino acid residue comprising an olefin group to form a staple through the other of the two olefin groups
  SITE 6: note = (S)-3-(2-amino-2-carboxyethyl)benzoic acid
  SITE 7: note = 2-amino-2-methylpropanoic acid
  SITE 10: note = L-lysine, useful for stapling/stapled with another amino acid residue comprising a side chain acid group to form a staple through the 6-amino group
  SITE 11: note (S)-3-amino-1-((pent-4-en-1-yloxy)carbonyl)pyrrolidine-3-ca rboxylic acid, useful for stapling/stapled with another amino acid residue comprising an olefin group to form a staple through the olefin group
  SITE 12: note = (S)-2-amino-3-(thiophen-3-yl)propanoic acid
  SITE 13: note = (S)-2-amino-3-(benzo[b]thiophen-3-yl)propanoic acid
  SITE 14: note = L-glutamic acid, useful for stapling/stapled with another amino acid residue comprising a side chain amino group to form a staple through the 4-carboxyl group
  SITE 20: note = C-term amino
XDXXDXXAFKXXXEAVPALR

SEQ ID NO: 579 - protein, 21 aa, synthetic construct
  SITE 1: note = N-term Acetic Acid
  SITE 1: note = (R)-2-allylpyrrolidine-2-carboxylic acid, useful for stapling/stapled with another amino acid residue comprising an olefin group to form a staple through the olefin group
  SITE 3: note = (S)-2-amino-4,4-dimethylpentanoic acid
  VARIANT 4: note = 2-amino-2-(pent-4-en-1-yl)hept-6-enoic acid, useful for stapling/stapled with another amino acid residue comprising an olefin group to form a staple through one of the two olefin groups and/or with another amino acid residue comprising an olefin group to form a staple through the other of the two olefin groups
  SITE 6: note = (S)-3-(2-amino-2-carboxyethyl)benzoic acid
  SITE 7: note = 2-amino-2-methylpropanoic acid
  SITE 10: note = L-lysine, useful for stapling/stapled with another amino acid residue comprising a side chain acid group to form a staple through the 6-amino group
  SITE 11: note (S)-3-amino-1-((pent-4-en-1-yloxy)carbonyl)pyrrolidine-3-ca rboxylic acid, useful for stapling/stapled with another amino acid residue comprising an olefin group to form a staple through the olefin group
  SITE 12: note = (S)-2-amino-3-(thiophen-3-yl)propanoic acid
  SITE 13: note = (S)-2-amino-3-(benzo[b]thiophen-3-yl)propanoic acid
  SITE 14: note = L-glutamic acid, useful for stapling/stapled with another amino acid residue comprising a side chain amino group to form a staple through the 4-carboxyl group
  SITE 21: note = C-term amino
XDXXDXXAFKXXXEAAVPALR

SEQ ID NO: 580 - protein, 15 aa, synthetic construct
  SITE 1: note = N-term Acetic Acid
  SITE 1: note = (R)-2-allylpyrrolidine-2-carboxylic acid, useful for stapling/stapled with another amino acid residue comprising an olefin group to form a staple through the olefin group
  SITE 2: note = 2,2'-azanediyldiacetic acid
  SITE 3: note = (S)-2-amino-4,4-dimethylpentanoic acid
  VARIANT 4: note = 2-amino-2-(pent-4-en-1-yl)hept-6-enoic acid, useful for stapling/stapled with another amino acid residue comprising an olefin group to form a staple through one of the two olefin groups and/or with another amino acid residue comprising an olefin group to form a staple through the other of the two olefin groups
  SITE 6: note = (S)-3-(2-amino-2-carboxyethyl)benzoic acid
  SITE 7: note = 2-amino-2-methylpropanoic acid
  SITE 10: note = L-lysine, useful for stapling/stapled with another amino acid residue comprising a side chain acid group to form a staple through the 6-amino group
  SITE 11: note (S)-3-amino-1-((pent-4-en-1-yloxy)carbonyl)pyrrolidine-3-ca rboxylic acid, useful for stapling/stapled with another amino acid residue comprising an olefin group to form a staple through the olefin group
  SITE 12: note = (S)-2-amino-3-(thiophen-3-yl)propanoic acid
  SITE 13: note = (S)-2-amino-3-(benzo[b]thiophen-3-yl)propanoic acid
  SITE 14: note = L-glutamic acid, useful for stapling/stapled with another amino acid residue comprising a side chain amino group to form a staple through the 4-carboxyl group
  SITE 15: note = C-term amino
XXXXDXXAFKXXXEA

SEQ ID NO: 581 - protein, 15 aa, synthetic construct
  SITE 1: note = N-term Acetic Acid
  SITE 1: note = (R)-2-allylpyrrolidine-2-carboxylic acid, useful for stapling/stapled with another amino acid residue comprising an olefin group to form a staple through the olefin group
  SITE 3: note = (S)-2-amino-4,4-dimethylpentanoic acid
  VARIANT 4: note = 2-amino-2-(pent-4-en-1-yl)hept-6-enoic acid, useful for stapling/stapled with another amino acid residue comprising an olefin group to form a staple through one of the two olefin groups and/or with another amino acid residue comprising an olefin group to form a staple through the other of the two olefin groups
  SITE 6: note = (S)-3-(2-amino-2-carboxyethyl)benzoic acid
  SITE 10: note = L-lysine, useful for stapling/stapled with another amino acid residue comprising a side chain acid group to form a staple through the 6-amino group
  SITE 11: note (S)-3-amino-1-((pent-4-en-1-yloxy)carbonyl)pyrrolidine-3-ca rboxylic acid, useful for stapling/stapled with another amino acid residue comprising an olefin group to form a staple through the olefin group
  SITE 12: note = (S)-2-amino-3-(2-(trifluoromethyl)phenyl)propanoic acid
  SITE 13: note = (S)-2-amino-3-(benzo[b]thiophen-3-yl)propanoic acid
  SITE 14: note = L-glutamic acid, useful for stapling/stapled with another amino acid residue comprising a side chain amino group to form a staple through the 4-carboxyl group
  SITE 15: note = C-term amino
XDXXDXAAFKXXXEV

SEQ ID NO: 582 - protein, 16 aa, synthetic construct
  SITE 1: note = N-term Acetic Acid
  SITE 1: note = (R)-2-allylpyrrolidine-2-carboxylic acid, useful for stapling/stapled with another amino acid residue comprising an olefin group to form a staple through the olefin group
  SITE 3: note = (S)-2-amino-4,4-dimethylpentanoic acid
  VARIANT 4: note = 2-amino-2-(pent-4-en-1-yl)hept-6-enoic acid, useful for stapling/stapled with another amino acid residue comprising an olefin group to form a staple through one of the two olefin groups and/or with another amino acid residue comprising an olefin group to form a staple through the other of the two olefin groups
  SITE 6: note = (S)-3-(2-amino-2-carboxyethyl)benzoic acid
  SITE 10: note = L-lysine, useful for stapling/stapled with another amino acid residue comprising a side chain acid group to form a staple through the 6-amino group
  SITE 11: note (S)-3-amino-1-((pent-4-en-1-yloxy)carbonyl)pyrrolidine-3-ca rboxylic acid, useful for stapling/stapled with another amino acid residue comprising an olefin group to form a staple through the olefin group
  SITE 12: note = (S)-2-amino-3-(2-(trifluoromethyl)phenyl)propanoic acid
  SITE 13: note = (S)-2-amino-3-(benzo[b]thiophen-3-yl)propanoic acid
  SITE 14: note = L-glutamic acid, useful for stapling/stapled with another amino acid residue comprising a side chain amino group to form a staple through the 4-carboxyl group
  SITE 16: note = C-term amino
XDXXDXAAFKXXXEVS

SEQ ID NO: 583 - protein, 15 aa, synthetic construct
  SITE 1: note = N-term Acetic Acid
  SITE 1: note = (R)-2-allylpyrrolidine-2-carboxylic acid, useful for stapling/stapled with another amino acid residue comprising an olefin group to form a staple through the olefin group
  SITE 3: note = (S)-2-amino-4,4-dimethylpentanoic acid
  VARIANT 4: note = 2-amino-2-(pent-4-en-1-yl)hept-6-enoic acid, useful for stapling/stapled with another amino acid residue comprising an olefin group to form a staple through one of the two olefin groups and/or with another amino acid residue comprising an olefin group to form a staple through the other of the two olefin groups
  SITE 6: note = (S)-3-(2-amino-2-carboxyethyl)benzoic acid
  SITE 10: note = L-lysine, useful for stapling/stapled with another amino acid residue comprising a side chain acid group to form a staple through the 6-amino group
  SITE 11: note (S)-3-amino-1-((pent-4-en-1-yloxy)carbonyl)pyrrolidine-3-ca rboxylic acid, useful for stapling/stapled with another amino acid residue comprising an olefin group to form a staple through the olefin group
  SITE 12: note = (S)-2-amino-3-(2-(trifluoromethyl)phenyl)propanoic acid
  SITE 13: note = (S)-2-amino-3-(3,4-dichlorophenyl)propanoic acid
  SITE 14: note = L-glutamic acid, useful for stapling/stapled with another amino acid residue comprising a side chain amino group to form a staple through the 4-carboxyl group
  SITE 15: note = C-term amino
XDXXDXAAFKXXXEA

SEQ ID NO: 584 - protein, 15 aa, synthetic construct
  SITE 1: note = N-term Acetic Acid
  SITE 1: note = (R)-2-allylpyrrolidine-2-carboxylic acid, useful for stapling/stapled with another amino acid residue comprising an olefin group to form a staple through the olefin group
  SITE 3: note = (S)-2-amino-4,4-dimethylpentanoic acid
  VARIANT 4: note = 2-amino-2-(pent-4-en-1-yl)hept-6-enoic acid, useful for stapling/stapled with another amino acid residue comprising an olefin group to form a staple through one of the two olefin groups and/or with another amino acid residue comprising an olefin group to form a staple through the other of the two olefin groups
  SITE 6: note = (S)-3-(2-amino-2-carboxyethyl)benzoic acid
  SITE 10: note = L-lysine, useful for stapling/stapled with another amino acid residue comprising a side chain acid group to form a staple through the 6-amino group
  SITE 11: note (S)-3-amino-1-((pent-4-en-1-yloxy)carbonyl)pyrrolidine-3-ca rboxylic acid, useful for stapling/stapled with another amino acid residue comprising an olefin group to form a staple through the olefin group
  SITE 12: note = (S)-2-amino-3-(2-(trifluoromethyl)phenyl)propanoic acid
  SITE 13: note = (S)-2-amino-3-(3,4-dichlorophenyl)propanoic acid
  SITE 14: note = L-glutamic acid, useful for stapling/stapled with another amino acid residue comprising a side chain amino group to form a staple through the 4-carboxyl group
  SITE 15: note = C-term amino
XDXXDXAAFKXXXEV

SEQ ID NO: 585 - protein, 16 aa, synthetic construct
  SITE 1: note = N-term Acetic Acid
  SITE 1: note = (R)-2-allylpyrrolidine-2-carboxylic acid, useful for stapling/stapled with another amino acid residue comprising an olefin group to form a staple through the olefin group
  SITE 3: note = (S)-2-amino-4,4-dimethylpentanoic acid
  VARIANT 4: note = 2-amino-2-(pent-4-en-1-yl)hept-6-enoic acid, useful for stapling/stapled with another amino acid residue comprising an olefin group to form a staple through one of the two olefin groups and/or with another amino acid residue comprising an olefin group to form a staple through the other of the two olefin groups
  SITE 6: note = (S)-3-(2-amino-2-carboxyethyl)benzoic acid
  SITE 10: note = L-lysine, useful for stapling/stapled with another amino acid residue comprising a side chain acid group to form a staple through the 6-amino group
  SITE 11: note (S)-3-amino-1-((pent-4-en-1-yloxy)carbonyl)pyrrolidine-3-ca rboxylic acid, useful for stapling/stapled with another amino acid residue comprising an olefin group to form a staple through the olefin group
  SITE 12: note = (S)-2-amino-3-(2-(trifluoromethyl)phenyl)propanoic acid
  SITE 13: note = (S)-2-amino-3-(3,4-dichlorophenyl)propanoic acid
  SITE 14: note = L-glutamic acid, useful for stapling/stapled with another amino acid residue comprising a side chain amino group to form a staple through the 4-carboxyl group
  SITE 16: note = C-term amino
XDXXDXAAFKXXXEVS

SEQ ID NO: 586 - protein, 15 aa, synthetic construct
  SITE 1: note = N-term Acetic Acid
  SITE 1: note = (R)-2-allylpyrrolidine-2-carboxylic acid, useful for stapling/stapled with another amino acid residue comprising an olefin group to form a staple through the olefin group
  SITE 3: note = (S)-2-amino-4,4-dimethylpentanoic acid
  VARIANT 4: note = 2-amino-2-(pent-4-en-1-yl)hept-6-enoic acid, useful for stapling/stapled with another amino acid residue comprising an olefin group to form a staple through one of the two olefin groups and/or with another amino acid residue comprising an olefin group to form a staple through the other of the two olefin groups
  SITE 6: note = (S)-3-(2-amino-2-carboxyethyl)benzoic acid
  SITE 10: note = L-lysine, useful for stapling/stapled with another amino acid residue comprising a side chain acid group to form a staple through the 6-amino group
  SITE 11: note (S)-3-amino-1-((pent-4-en-1-yloxy)carbonyl)pyrrolidine-3-ca rboxylic acid, useful for stapling/stapled with another amino acid residue comprising an olefin group to form a staple through the olefin group
  SITE 12: note = (S)-2-amino-3-(2-(trifluoromethyl)phenyl)propanoic acid
  SITE 13: note = (S)-2-amino-3-(3,4-dichlorophenyl)propanoic acid
  SITE 14: note = L-glutamic acid, useful for stapling/stapled with another amino acid residue comprising a side chain amino group to form a staple through the 4-carboxyl group
  SITE 15: note = C-term amino
XDXXDXAAFKXXXEL

SEQ ID NO: 587 - protein, 16 aa, synthetic construct
  SITE 1: note = N-term Acetic Acid
  SITE 1: note = (R)-2-allylpyrrolidine-2-carboxylic acid, useful for stapling/stapled with another amino acid residue comprising an olefin group to form a staple through the olefin group
  SITE 3: note = (S)-2-amino-4,4-dimethylpentanoic acid
  VARIANT 4: note = 2-amino-2-(pent-4-en-1-yl)hept-6-enoic acid, useful for stapling/stapled with another amino acid residue comprising an olefin group to form a staple through one of the two olefin groups and/or with another amino acid residue comprising an olefin group to form a staple through the other of the two olefin groups
  SITE 6: note = (S)-3-(2-amino-2-carboxyethyl)benzoic acid
  SITE 10: note = L-lysine, useful for stapling/stapled with another amino acid residue comprising a side chain acid group to form a staple through the 6-amino group
  SITE 11: note (S)-3-amino-1-((pent-4-en-1-yloxy)carbonyl)pyrrolidine-3-ca rboxylic acid, useful for stapling/stapled with another amino acid residue comprising an olefin group to form a staple through the olefin group
  SITE 12: note = (S)-2-amino-3-(2-(trifluoromethyl)phenyl)propanoic acid
  SITE 13: note = (S)-2-amino-3-(3,4-dichlorophenyl)propanoic acid
  SITE 14: note = L-glutamic acid, useful for stapling/stapled with another amino acid residue comprising a side chain amino group to form a staple through the 4-carboxyl group
  SITE 16: note = C-term amino
XDXXDXAAFKXXXELS

SEQ ID NO: 588 - protein, 15 aa, synthetic construct
  SITE 1: note = N-term Acetic Acid
  SITE 1: note = (R)-2-allylpyrrolidine-2-carboxylic acid, useful for stapling/stapled with another amino acid residue comprising an olefin group to form a staple through the olefin group
  SITE 3: note = (S)-2-amino-4,4-dimethylpentanoic acid
  VARIANT 4: note = 2-amino-2-(pent-4-en-1-yl)hept-6-enoic acid, useful for stapling/stapled with another amino acid residue comprising an olefin group to form a staple through one of the two olefin groups and/or with another amino acid residue comprising an olefin group to form a staple through the other of the two olefin groups
  SITE 6: note = (S)-3-(2-amino-2-carboxyethyl)benzoic acid
  SITE 10: note = L-lysine, useful for stapling/stapled with another amino acid residue comprising a side chain acid group to form a staple through the 6-amino group
  SITE 11: note (S)-3-amino-1-((pent-4-en-1-yloxy)carbonyl)pyrrolidine-3-ca rboxylic acid, useful for stapling/stapled with another amino acid residue comprising an olefin group to form a staple through the olefin group
  SITE 13: note = (S)-2-amino-3-(3,4-dichlorophenyl)propanoic acid
  SITE 14: note = L-glutamic acid, useful for stapling/stapled with another amino acid residue comprising a side chain amino group to form a staple through the 4-carboxyl group
  SITE 15: note = C-term amino
XDXXDXAAFKXFXEA

SEQ ID NO: 589 - protein, 15 aa, synthetic construct
  SITE 1: note = N-term Acetic Acid
  SITE 1: note = (R)-2-allylpyrrolidine-2-carboxylic acid, useful for stapling/stapled with another amino acid residue comprising an olefin group to form a staple through the olefin group
  SITE 3: note = (S)-2-amino-4,4-dimethylpentanoic acid
  VARIANT 4: note = 2-amino-2-(pent-4-en-1-yl)hept-6-enoic acid, useful for stapling/stapled with another amino acid residue comprising an olefin group to form a staple through one of the two olefin groups and/or with another amino acid residue comprising an olefin group to form a staple through the other of the two olefin groups
  SITE 6: note = (S)-3-(2-amino-2-carboxyethyl)benzoic acid
  SITE 10: note = L-lysine, useful for stapling/stapled with another amino acid residue comprising a side chain acid group to form a staple through the 6-amino group
  SITE 11: note (S)-3-amino-1-((pent-4-en-1-yloxy)carbonyl)pyrrolidine-3-ca rboxylic acid, useful for stapling/stapled with another amino acid residue comprising an olefin group to form a staple through the olefin group
  SITE 13: note = (S)-2-amino-3-(3,4-dichlorophenyl)propanoic acid
  SITE 14: note = L-glutamic acid, useful for stapling/stapled with another amino acid residue comprising a side chain amino group to form a staple through the 4-carboxyl group
  SITE 15: note = C-term amino
XDXXDXAAFKXFXEV

SEQ ID NO: 590 - protein, 16 aa, synthetic construct
  SITE 1: note = N-term Acetic Acid
  SITE 1: note = (R)-2-allylpyrrolidine-2-carboxylic acid, useful for stapling/stapled with another amino acid residue comprising an olefin group to form a staple through the olefin group
  SITE 3: note = (S)-2-amino-4,4-dimethylpentanoic acid
  VARIANT 4: note = 2-amino-2-(pent-4-en-1-yl)hept-6-enoic acid, useful for stapling/stapled with another amino acid residue comprising an olefin group to form a staple through one of the two olefin groups and/or with another amino acid residue comprising an olefin group to form a staple through the other of the two olefin groups
  SITE 6: note = (S)-3-(2-amino-2-carboxyethyl)benzoic acid
  SITE 10: note = L-lysine, useful for stapling/stapled with another amino acid residue comprising a side chain acid group to form a staple through the 6-amino group
  SITE 11: note (S)-3-amino-1-((pent-4-en-1-yloxy)carbonyl)pyrrolidine-3-ca rboxylic acid, useful for stapling/stapled with another amino acid residue comprising an olefin group to form a staple through the olefin group
  SITE 13: note = (S)-2-amino-3-(3,4-dichlorophenyl)propanoic acid
  SITE 14: note = L-glutamic acid, useful for stapling/stapled with another amino acid residue comprising a side chain amino group to form a staple through the 4-carboxyl group
  SITE 16: note = C-term amino
XDXXDXAAFKXFXEVS

SEQ ID NO: 591 - protein, 15 aa, synthetic construct
  SITE 1: note = N-term Acetic Acid
  SITE 1: note = (R)-2-allylpyrrolidine-2-carboxylic acid, useful for stapling/stapled with another amino acid residue comprising an olefin group to form a staple through the olefin group
  SITE 3: note = (S)-2-amino-4,4-dimethylpentanoic acid
  VARIANT 4: note = 2-amino-2-(pent-4-en-1-yl)hept-6-enoic acid, useful for stapling/stapled with another amino acid residue comprising an olefin group to form a staple through one of the two olefin groups and/or with another amino acid residue comprising an olefin group to form a staple through the other of the two olefin groups
  SITE 6: note = (S)-3-(2-amino-2-carboxyethyl)benzoic acid
  SITE 10: note = L-lysine, useful for stapling/stapled with another amino acid residue comprising a side chain acid group to form a staple through the 6-amino group
  SITE 11: note (S)-3-amino-1-((pent-4-en-1-yloxy)carbonyl)pyrrolidine-3-ca rboxylic acid, useful for stapling/stapled with another amino acid residue comprising an olefin group to form a staple through the olefin group
  SITE 13: note = (S)-2-amino-3-(3,4-dichlorophenyl)propanoic acid
  SITE 14: note = L-glutamic acid, useful for stapling/stapled with another amino acid residue comprising a side chain amino group to form a staple through the 4-carboxyl group
  SITE 15: note = C-term amino
XDXXDXAAFKXFXEL

SEQ ID NO: 592 - protein, 16 aa, synthetic construct
  SITE 1: note = N-term Acetic Acid
  SITE 1: note = (R)-2-allylpyrrolidine-2-carboxylic acid, useful for stapling/stapled with another amino acid residue comprising an olefin group to form a staple through the olefin group
  SITE 3: note = (S)-2-amino-4,4-dimethylpentanoic acid
  VARIANT 4: note = 2-amino-2-(pent-4-en-1-yl)hept-6-enoic acid, useful for stapling/stapled with another amino acid residue comprising an olefin group to form a staple through one of the two olefin groups and/or with another amino acid residue comprising an olefin group to form a staple through the other of the two olefin groups
  SITE 6: note = (S)-3-(2-amino-2-carboxyethyl)benzoic acid
  SITE 10: note = L-lysine, useful for stapling/stapled with another amino acid residue comprising a side chain acid group to form a staple through the 6-amino group
  SITE 11: note (S)-3-amino-1-((pent-4-en-1-yloxy)carbonyl)pyrrolidine-3-ca rboxylic acid, useful for stapling/stapled with another amino acid residue comprising an olefin group to form a staple through the olefin group
  SITE 13: note = (S)-2-amino-3-(3,4-dichlorophenyl)propanoic acid
  SITE 14: note = L-glutamic acid, useful for stapling/stapled with another amino acid residue comprising a side chain amino group to form a staple through the 4-carboxyl group
  SITE 16: note = C-term amino
XDXXDXAAFKXFXELS

SEQ ID NO: 593 - protein, 15 aa, synthetic construct
  SITE 1: note = N-term Acetic Acid
  SITE 1: note = (R)-2-allylpyrrolidine-2-carboxylic acid, useful for stapling/stapled with another amino acid residue comprising an olefin group to form a staple through the olefin group
  SITE 3: note = (S)-2-amino-3-cyclohexylpropanoic acid
  VARIANT 4: note = 2-amino-2-(pent-4-en-1-yl)hept-6-enoic acid, useful for stapling/stapled with another amino acid residue comprising an olefin group to form a staple through one of the two olefin groups and/or with another amino acid residue comprising an olefin group to form a staple through the other of the two olefin groups
  SITE 6: note = (S)-3-(2-amino-2-carboxyethyl)benzoic acid
  SITE 10: note = L-lysine, useful for stapling/stapled with another amino acid residue comprising a side chain acid group to form a staple through the 6-amino group
  SITE 11: note (S)-3-amino-1-((pent-4-en-1-yloxy)carbonyl)pyrrolidine-3-ca rboxylic acid, useful for stapling/stapled with another amino acid residue comprising an olefin group to form a staple through the olefin group
  SITE 12: note = (S)-2-amino-3-(thiophen-3-yl)propanoic acid
  SITE 13: note = (S)-2-amino-3-(benzo[b]thiophen-3-yl)propanoic acid
  SITE 14: note = L-glutamic acid, useful for stapling/stapled with another amino acid residue comprising a side chain amino group to form a staple through the 4-carboxyl group
  SITE 15: note = C-term amino
XDXXDXFAFKXXXEA

SEQ ID NO: 594 - protein, 15 aa, synthetic construct
  SITE 1: note = N-term Acetic Acid
  SITE 1: note = (R)-2-allylpyrrolidine-2-carboxylic acid, useful for stapling/stapled with another amino acid residue comprising an olefin group to form a staple through the olefin group
  SITE 3: note = (S)-2-aminohexanoic acid
  VARIANT 4: note = 2-amino-2-(pent-4-en-1-yl)hept-6-enoic acid, useful for stapling/stapled with another amino acid residue comprising an olefin group to form a staple through one of the two olefin groups and/or with another amino acid residue comprising an olefin group to form a staple through the other of the two olefin groups
  SITE 6: note = (S)-3-(2-amino-2-carboxyethyl)benzoic acid
  SITE 10: note = L-lysine, useful for stapling/stapled with another amino acid residue comprising a side chain acid group to form a staple through the 6-amino group
  SITE 11: note (S)-3-amino-1-((pent-4-en-1-yloxy)carbonyl)pyrrolidine-3-ca rboxylic acid, useful for stapling/stapled with another amino acid residue comprising an olefin group to form a staple through the olefin group
  SITE 12: note = (S)-2-amino-3-(thiophen-3-yl)propanoic acid
  SITE 13: note = (S)-2-amino-3-(benzo[b]thiophen-3-yl)propanoic acid
  SITE 14: note = L-glutamic acid, useful for stapling/stapled with another amino acid residue comprising a side chain amino group to form a staple through the 4-carboxyl group
  SITE 15: note = C-term amino
XDXXDXFAFKXXXEA

SEQ ID NO: 595 - protein, 15 aa, synthetic construct
  SITE 1: note = N-term Acetic Acid
  SITE 1: note = (R)-2-allylpyrrolidine-2-carboxylic acid, useful for stapling/stapled with another amino acid residue comprising an olefin group to form a staple through the olefin group
  VARIANT 4: note = 2-amino-2-(pent-4-en-1-yl)hept-6-enoic acid, useful for stapling/stapled with another amino acid residue comprising an olefin group to form a staple through one of the two olefin groups and/or with another amino acid residue comprising an olefin group to form a staple through the other of the two olefin groups
  SITE 6: note = (S)-3-(2-amino-2-carboxyethyl)benzoic acid
  SITE 7: note = 2-amino-2,3-dihydro-1H-indene-2-carboxylic acid
  SITE 10: note = L-lysine, useful for stapling/stapled with another amino acid residue comprising a side chain acid group to form a staple through the 6-amino group
  SITE 11: note (S)-3-amino-1-((pent-4-en-1-yloxy)carbonyl)pyrrolidine-3-ca rboxylic acid, useful for stapling/stapled with another amino acid residue comprising an olefin group to form a staple through the olefin group
  SITE 12: note = (S)-2-amino-3-(thiophen-3-yl)propanoic acid
  SITE 13: note = (S)-2-amino-3-(benzo[b]thiophen-3-yl)propanoic acid
  SITE 14: note = L-glutamic acid, useful for stapling/stapled with another amino acid residue comprising a side chain amino group to form a staple through the 4-carboxyl group
  SITE 15: note = C-term amino
XDIXDXXAFKXXXEA

SEQ ID NO: 596 - protein, 15 aa, synthetic construct
  SITE 1: note = N-term Acetic Acid
  SITE 1: note = (R)-2-allylpyrrolidine-2-carboxylic acid, useful for stapling/stapled with another amino acid residue comprising an olefin group to form a staple through the olefin group
  SITE 3: note = (S)-2-amino-2-cyclohexylacetic acid
  VARIANT 4: note = 2-amino-2-(pent-4-en-1-yl)hept-6-enoic acid, useful for stapling/stapled with another amino acid residue comprising an olefin group to form a staple through one of the two olefin groups and/or with another amino acid residue comprising an olefin group to form a staple through the other of the two olefin groups
  SITE 6: note = (S)-3-(2-amino-2-carboxyethyl)benzoic acid
  SITE 7: note = 2-amino-2,3-dihydro-1H-indene-2-carboxylic acid
  SITE 10: note = L-lysine, useful for stapling/stapled with another amino acid residue comprising a side chain acid group to form a staple through the 6-amino group
  SITE 11: note (S)-3-amino-1-((pent-4-en-1-yloxy)carbonyl)pyrrolidine-3-ca rboxylic acid, useful for stapling/stapled with another amino acid residue comprising an olefin group to form a staple through the olefin group
  SITE 12: note = (S)-2-amino-3-(thiophen-3-yl)propanoic acid
  SITE 13: note = (S)-2-amino-3-(benzo[b]thiophen-3-yl)propanoic acid
  SITE 14: note = L-glutamic acid, useful for stapling/stapled with another amino acid residue comprising a side chain amino group to form a staple through the 4-carboxyl group
  SITE 15: note = C-term amino
XDXXDXXAFKXXXEA

SEQ ID NO: 597 - protein, 15 aa, synthetic construct
  SITE 1: note = N-term Acetic Acid
  SITE 1: note = (R)-2-allylpyrrolidine-2-carboxylic acid, useful for stapling/stapled with another amino acid residue comprising an olefin group to form a staple through the olefin group
  SITE 3: note = (S)-2-amino-3,3-diphenylpropanoic acid
  VARIANT 4: note = 2-amino-2-(pent-4-en-1-yl)hept-6-enoic acid, useful for stapling/stapled with another amino acid residue comprising an olefin group to form a staple through one of the two olefin groups and/or with another amino acid residue comprising an olefin group to form a staple through the other of the two olefin groups
  SITE 6: note = (S)-3-(2-amino-2-carboxyethyl)benzoic acid
  SITE 7: note = 2-amino-2,3-dihydro-1H-indene-2-carboxylic acid
  SITE 10: note = L-lysine, useful for stapling/stapled with another amino acid residue comprising a side chain acid group to form a staple through the 6-amino group
  SITE 11: note (S)-3-amino-1-((pent-4-en-1-yloxy)carbonyl)pyrrolidine-3-ca rboxylic acid, useful for stapling/stapled with another amino acid residue comprising an olefin group to form a staple through the olefin group
  SITE 12: note = (S)-2-amino-3-(thiophen-3-yl)propanoic acid
  SITE 13: note = (S)-2-amino-3-(benzo[b]thiophen-3-yl)propanoic acid
  SITE 14: note = L-glutamic acid, useful for stapling/stapled with another amino acid residue comprising a side chain amino group to form a staple through the 4-carboxyl group
  SITE 15: note = C-term amino
XDXXDXXAFKXXXEA

SEQ ID NO: 598 - protein, 15 aa, synthetic construct
  SITE 1: note = N-term Acetic Acid
  SITE 1: note = (R)-2-allylpyrrolidine-2-carboxylic acid, useful for stapling/stapled with another amino acid residue comprising an olefin group to form a staple through the olefin group
  SITE 3: note = (S)-2-amino-3-cyclohexylpropanoic acid
  VARIANT 4: note = 2-amino-2-(pent-4-en-1-yl)hept-6-enoic acid, useful for stapling/stapled with another amino acid residue comprising an olefin group to form a staple through one of the two olefin groups and/or with another amino acid residue comprising an olefin group to form a staple through the other of the two olefin groups
  SITE 6: note = (S)-3-(2-amino-2-carboxyethyl)benzoic acid
  SITE 7: note = 2-amino-2,3-dihydro-1H-indene-2-carboxylic acid
  SITE 10: note = L-lysine, useful for stapling/stapled with another amino acid residue comprising a side chain acid group to form a staple through the 6-amino group
  SITE 11: note (S)-3-amino-1-((pent-4-en-1-yloxy)carbonyl)pyrrolidine-3-ca rboxylic acid, useful for stapling/stapled with another amino acid residue comprising an olefin group to form a staple through the olefin group
  SITE 12: note = (S)-2-amino-3-(thiophen-3-yl)propanoic acid
  SITE 13: note = (S)-2-amino-3-(benzo[b]thiophen-3-yl)propanoic acid
  SITE 14: note = L-glutamic acid, useful for stapling/stapled with another amino acid residue comprising a side chain amino group to form a staple through the 4-carboxyl group
  SITE 15: note = C-term amino
XDXXDXXAFKXXXEA

SEQ ID NO: 599 - protein, 15 aa, synthetic construct
  SITE 1: note = N-term Acetic Acid
  SITE 1: note = (R)-2-allylpyrrolidine-2-carboxylic acid, useful for stapling/stapled with another amino acid residue comprising an olefin group to form a staple through the olefin group
  SITE 3: note = (S)-2-amino-3-cyclobutylpropanoic acid
  VARIANT 4: note = 2-amino-2-(pent-4-en-1-yl)hept-6-enoic acid, useful for stapling/stapled with another amino acid residue comprising an olefin group to form a staple through one of the two olefin groups and/or with another amino acid residue comprising an olefin group to form a staple through the other of the two olefin groups
  SITE 6: note = (S)-3-(2-amino-2-carboxyethyl)benzoic acid
  SITE 7: note = 2-amino-2,3-dihydro-1H-indene-2-carboxylic acid
  SITE 10: note = L-lysine, useful for stapling/stapled with another amino acid residue comprising a side chain acid group to form a staple through the 6-amino group
  SITE 11: note (S)-3-amino-1-((pent-4-en-1-yloxy)carbonyl)pyrrolidine-3-ca rboxylic acid, useful for stapling/stapled with another amino acid residue comprising an olefin group to form a staple through the olefin group
  SITE 12: note = (S)-2-amino-3-(thiophen-3-yl)propanoic acid
  SITE 13: note = (S)-2-amino-3-(benzo[b]thiophen-3-yl)propanoic acid
  SITE 14: note = L-glutamic acid, useful for stapling/stapled with another amino acid residue comprising a side chain amino group to form a staple through the 4-carboxyl group
  SITE 15: note = C-term amino
XDXXDXXAFKXXXEA

SEQ ID NO: 600 - protein, 15 aa, synthetic construct
  SITE 1: note = N-term Acetic Acid
  SITE 1: note = (R)-2-allylpyrrolidine-2-carboxylic acid, useful for stapling/stapled with another amino acid residue comprising an olefin group to form a staple through the olefin group
  SITE 3: note = (S)-2-aminohexanoic acid
  VARIANT 4: note = 2-amino-2-(pent-4-en-1-yl)hept-6-enoic acid, useful for stapling/stapled with another amino acid residue comprising an olefin group to form a staple through one of the two olefin groups and/or with another amino acid residue comprising an olefin group to form a staple through the other of the two olefin groups
  SITE 6: note = (S)-3-(2-amino-2-carboxyethyl)benzoic acid
  SITE 7: note = 2-amino-2,3-dihydro-1H-indene-2-carboxylic acid
  SITE 10: note = L-lysine, useful for stapling/stapled with another amino acid residue comprising a side chain acid group to form a staple through the 6-amino group
  SITE 11: note (S)-3-amino-1-((pent-4-en-1-yloxy)carbonyl)pyrrolidine-3-ca rboxylic acid, useful for stapling/stapled with another amino acid residue comprising an olefin group to form a staple through the olefin group
  SITE 12: note = (S)-2-amino-3-(thiophen-3-yl)propanoic acid
  SITE 13: note = (S)-2-amino-3-(benzo[b]thiophen-3-yl)propanoic acid
  SITE 14: note = L-glutamic acid, useful for stapling/stapled with another amino acid residue comprising a side chain amino group to form a staple through the 4-carboxyl group
  SITE 15: note = C-term amino
XDXXDXXAFKXXXEA

SEQ ID NO: 601 - protein, 15 aa, synthetic construct
  SITE 1: note = N-term Acetic Acid
  SITE 1: note = (R)-2-allylpyrrolidine-2-carboxylic acid, useful for stapling/stapled with another amino acid residue comprising an olefin group to form a staple through the olefin group
  VARIANT 4: note = 2-amino-2-(pent-4-en-1-yl)hept-6-enoic acid, useful for stapling/stapled with another amino acid residue comprising an olefin group to form a staple through one of the two olefin groups and/or with another amino acid residue comprising an olefin group to form a staple through the other of the two olefin groups
  SITE 6: note = (S)-3-(2-amino-2-carboxyethyl)benzoic acid
  SITE 7: note = 1-aminocyclohexane-1-carboxylic acid
  SITE 10: note = L-lysine, useful for stapling/stapled with another amino acid residue comprising a side chain acid group to form a staple through the 6-amino group
  SITE 11: note (S)-3-amino-1-((pent-4-en-1-yloxy)carbonyl)pyrrolidine-3-ca rboxylic acid, useful for stapling/stapled with another amino acid residue comprising an olefin group to form a staple through the olefin group
  SITE 12: note = (S)-2-amino-3-(thiophen-3-yl)propanoic acid
  SITE 13: note = (S)-2-amino-3-(benzo[b]thiophen-3-yl)propanoic acid
  SITE 14: note = L-glutamic acid, useful for stapling/stapled with another amino acid residue comprising a side chain amino group to form a staple through the 4-carboxyl group
  SITE 15: note = C-term amino
XDIXDXXAFKXXXEA

SEQ ID NO: 602 - protein, 15 aa, synthetic construct
  SITE 1: note = N-term Acetic Acid
  SITE 1: note = (R)-2-allylpyrrolidine-2-carboxylic acid, useful for stapling/stapled with another amino acid residue comprising an olefin group to form a staple through the olefin group
  SITE 3: note = (S)-2-amino-2-cyclohexylacetic acid
  VARIANT 4: note = 2-amino-2-(pent-4-en-1-yl)hept-6-enoic acid, useful for stapling/stapled with another amino acid residue comprising an olefin group to form a staple through one of the two olefin groups and/or with another amino acid residue comprising an olefin group to form a staple through the other of the two olefin groups
  SITE 6: note = (S)-3-(2-amino-2-carboxyethyl)benzoic acid
  SITE 7: note = 1-aminocyclohexane-1-carboxylic acid
  SITE 10: note = L-lysine, useful for stapling/stapled with another amino acid residue comprising a side chain acid group to form a staple through the 6-amino group
  SITE 11: note (S)-3-amino-1-((pent-4-en-1-yloxy)carbonyl)pyrrolidine-3-ca rboxylic acid, useful for stapling/stapled with another amino acid residue comprising an olefin group to form a staple through the olefin group
  SITE 12: note = (S)-2-amino-3-(thiophen-3-yl)propanoic acid
  SITE 13: note = (S)-2-amino-3-(benzo[b]thiophen-3-yl)propanoic acid
  SITE 14: note = L-glutamic acid, useful for stapling/stapled with another amino acid residue comprising a side chain amino group to form a staple through the 4-carboxyl group
  SITE 15: note = C-term amino
XDXXDXXAFKXXXEA

SEQ ID NO: 603 - protein, 15 aa, synthetic construct
  SITE 1: note = N-term Acetic Acid
  SITE 1: note = (R)-2-allylpyrrolidine-2-carboxylic acid, useful for stapling/stapled with another amino acid residue comprising an olefin group to form a staple through the olefin group
  SITE 3: note = (S)-2-amino-3,3-diphenylpropanoic acid
  VARIANT 4: note = 2-amino-2-(pent-4-en-1-yl)hept-6-enoic acid, useful for stapling/stapled with another amino acid residue comprising an olefin group to form a staple through one of the two olefin groups and/or with another amino acid residue comprising an olefin group to form a staple through the other of the two olefin groups
  SITE 6: note = (S)-3-(2-amino-2-carboxyethyl)benzoic acid
  SITE 7: note = 1-aminocyclohexane-1-carboxylic acid
  SITE 10: note = L-lysine, useful for stapling/stapled with another amino acid residue comprising a side chain acid group to form a staple through the 6-amino group
  SITE 11: note (S)-3-amino-1-((pent-4-en-1-yloxy)carbonyl)pyrrolidine-3-ca rboxylic acid, useful for stapling/stapled with another amino acid residue comprising an olefin group to form a staple through the olefin group
  SITE 12: note = (S)-2-amino-3-(thiophen-3-yl)propanoic acid
  SITE 13: note = (S)-2-amino-3-(benzo[b]thiophen-3-yl)propanoic acid
  SITE 14: note = L-glutamic acid, useful for stapling/stapled with another amino acid residue comprising a side chain amino group to form a staple through the 4-carboxyl group
  SITE 15: note = C-term amino
XDXXDXXAFKXXXEA

SEQ ID NO: 604 - protein, 15 aa, synthetic construct
  SITE 1: note = N-term Acetic Acid
  SITE 1: note = (R)-2-allylpyrrolidine-2-carboxylic acid, useful for stapling/stapled with another amino acid residue comprising an olefin group to form a staple through the olefin group
  SITE 3: note = (S)-2-amino-3-cyclohexylpropanoic acid
  VARIANT 4: note = 2-amino-2-(pent-4-en-1-yl)hept-6-enoic acid, useful for stapling/stapled with another amino acid residue comprising an olefin group to form a staple through one of the two olefin groups and/or with another amino acid residue comprising an olefin group to form a staple through the other of the two olefin groups
  SITE 6: note = (S)-3-(2-amino-2-carboxyethyl)benzoic acid
  SITE 7: note = 1-aminocyclohexane-1-carboxylic acid
  SITE 10: note = L-lysine, useful for stapling/stapled with another amino acid residue comprising a side chain acid group to form a staple through the 6-amino group
  SITE 11: note (S)-3-amino-1-((pent-4-en-1-yloxy)carbonyl)pyrrolidine-3-ca rboxylic acid, useful for stapling/stapled with another amino acid residue comprising an olefin group to form a staple through the olefin group
  SITE 12: note = (S)-2-amino-3-(thiophen-3-yl)propanoic acid
  SITE 13: note = (S)-2-amino-3-(benzo[b]thiophen-3-yl)propanoic acid
  SITE 14: note = L-glutamic acid, useful for stapling/stapled with another amino acid residue comprising a side chain amino group to form a staple through the 4-carboxyl group
  SITE 15: note = C-term amino
XDXXDXXAFKXXXEA

SEQ ID NO: 605 - protein, 15 aa, synthetic construct
  SITE 1: note = N-term Acetic Acid
  SITE 1: note = (R)-2-allylpyrrolidine-2-carboxylic acid, useful for stapling/stapled with another amino acid residue comprising an olefin group to form a staple through the olefin group
  SITE 3: note = (S)-2-amino-3-cyclobutylpropanoic acid
  VARIANT 4: note = 2-amino-2-(pent-4-en-1-yl)hept-6-enoic acid, useful for stapling/stapled with another amino acid residue comprising an olefin group to form a staple through one of the two olefin groups and/or with another amino acid residue comprising an olefin group to form a staple through the other of the two olefin groups
  SITE 6: note = (S)-3-(2-amino-2-carboxyethyl)benzoic acid
  SITE 7: note = 1-aminocyclohexane-1-carboxylic acid
  SITE 10: note = L-lysine, useful for stapling/stapled with another amino acid residue comprising a side chain acid group to form a staple through the 6-amino group
  SITE 11: note (S)-3-amino-1-((pent-4-en-1-yloxy)carbonyl)pyrrolidine-3-ca rboxylic acid, useful for stapling/stapled with another amino acid residue comprising an olefin group to form a staple through the olefin group
  SITE 12: note = (S)-2-amino-3-(thiophen-3-yl)propanoic acid
  SITE 13: note = (S)-2-amino-3-(benzo[b]thiophen-3-yl)propanoic acid
  SITE 14: note = L-glutamic acid, useful for stapling/stapled with another amino acid residue comprising a side chain amino group to form a staple through the 4-carboxyl group
  SITE 15: note = C-term amino
XDXXDXXAFKXXXEA

SEQ ID NO: 606 - protein, 15 aa, synthetic construct
  SITE 1: note = N-term Acetic Acid
  SITE 1: note = (R)-2-allylpyrrolidine-2-carboxylic acid, useful for stapling/stapled with another amino acid residue comprising an olefin group to form a staple through the olefin group
  SITE 3: note = (S)-2-aminohexanoic acid
  VARIANT 4: note = 2-amino-2-(pent-4-en-1-yl)hept-6-enoic acid, useful for stapling/stapled with another amino acid residue comprising an olefin group to form a staple through one of the two olefin groups and/or with another amino acid residue comprising an olefin group to form a staple through the other of the two olefin groups
  SITE 6: note = (S)-3-(2-amino-2-carboxyethyl)benzoic acid
  SITE 7: note = 1-aminocyclohexane-1-carboxylic acid
  SITE 10: note = L-lysine, useful for stapling/stapled with another amino acid residue comprising a side chain acid group to form a staple through the 6-amino group
  SITE 11: note (S)-3-amino-1-((pent-4-en-1-yloxy)carbonyl)pyrrolidine-3-ca rboxylic acid, useful for stapling/stapled with another amino acid residue comprising an olefin group to form a staple through the olefin group
  SITE 12: note = (S)-2-amino-3-(thiophen-3-yl)propanoic acid
  SITE 13: note = (S)-2-amino-3-(benzo[b]thiophen-3-yl)propanoic acid
  SITE 14: note = L-glutamic acid, useful for stapling/stapled with another amino acid residue comprising a side chain amino group to form a staple through the 4-carboxyl group
  SITE 15: note = C-term amino
XDXXDXXAFKXXXEA

SEQ ID NO: 607 - protein, 15 aa, synthetic construct
  SITE 1: note = N-term Acetic Acid
  SITE 1: note = (R)-2-allylpyrrolidine-2-carboxylic acid, useful for stapling/stapled with another amino acid residue comprising an olefin group to form a staple through the olefin group
  VARIANT 4: note = 2-amino-2-(pent-4-en-1-yl)hept-6-enoic acid, useful for stapling/stapled with another amino acid residue comprising an olefin group to form a staple through one of the two olefin groups and/or with another amino acid residue comprising an olefin group to form a staple through the other of the two olefin groups
  SITE 6: note = (S)-3-(2-amino-2-carboxyethyl)benzoic acid
  SITE 7: note = 1-aminocyclobutane-1-carboxylic acid
  SITE 10: note = L-lysine, useful for stapling/stapled with another amino acid residue comprising a side chain acid group to form a staple through the 6-amino group
  SITE 11: note (S)-3-amino-1-((pent-4-en-1-yloxy)carbonyl)pyrrolidine-3-ca rboxylic acid, useful for stapling/stapled with another amino acid residue comprising an olefin group to form a staple through the olefin group
  SITE 12: note = (S)-2-amino-3-(thiophen-3-yl)propanoic acid
  SITE 13: note = (S)-2-amino-3-(benzo[b]thiophen-3-yl)propanoic acid
  SITE 14: note = L-glutamic acid, useful for stapling/stapled with another amino acid residue comprising a side chain amino group to form a staple through the 4-carboxyl group
  SITE 15: note = C-term amino
XDIXDXXAFKXXXEA

SEQ ID NO: 608 - protein, 15 aa, synthetic construct
  SITE 1: note = N-term Acetic Acid
  SITE 1: note = (R)-2-allylpyrrolidine-2-carboxylic acid, useful for stapling/stapled with another amino acid residue comprising an olefin group to form a staple through the olefin group
  SITE 3: note = (S)-2-amino-2-cyclohexylacetic acid
  VARIANT 4: note = 2-amino-2-(pent-4-en-1-yl)hept-6-enoic acid, useful for stapling/stapled with another amino acid residue comprising an olefin group to form a staple through one of the two olefin groups and/or with another amino acid residue comprising an olefin group to form a staple through the other of the two olefin groups
  SITE 6: note = (S)-3-(2-amino-2-carboxyethyl)benzoic acid
  SITE 7: note = 1-aminocyclobutane-1-carboxylic acid
  SITE 10: note = L-lysine, useful for stapling/stapled with another amino acid residue comprising a side chain acid group to form a staple through the 6-amino group
  SITE 11: note (S)-3-amino-1-((pent-4-en-1-yloxy)carbonyl)pyrrolidine-3-ca rboxylic acid, useful for stapling/stapled with another amino acid residue comprising an olefin group to form a staple through the olefin group
  SITE 12: note = (S)-2-amino-3-(thiophen-3-yl)propanoic acid
  SITE 13: note = (S)-2-amino-3-(benzo[b]thiophen-3-yl)propanoic acid
  SITE 14: note = L-glutamic acid, useful for stapling/stapled with another amino acid residue comprising a side chain amino group to form a staple through the 4-carboxyl group
  SITE 15: note = C-term amino
XDXXDXXAFKXXXEA

SEQ ID NO: 609 - protein, 15 aa, synthetic construct
  SITE 1: note = N-term Acetic Acid
  SITE 1: note = (R)-2-allylpyrrolidine-2-carboxylic acid, useful for stapling/stapled with another amino acid residue comprising an olefin group to form a staple through the olefin group
  SITE 3: note = (S)-2-amino-3,3-diphenylpropanoic acid
  VARIANT 4: note = 2-amino-2-(pent-4-en-1-yl)hept-6-enoic acid, useful for stapling/stapled with another amino acid residue comprising an olefin group to form a staple through one of the two olefin groups and/or with another amino acid residue comprising an olefin group to form a staple through the other of the two olefin groups
  SITE 6: note = (S)-3-(2-amino-2-carboxyethyl)benzoic acid
  SITE 7: note = 1-aminocyclobutane-1-carboxylic acid
  SITE 10: note = L-lysine, useful for stapling/stapled with another amino acid residue comprising a side chain acid group to form a staple through the 6-amino group
  SITE 11: note (S)-3-amino-1-((pent-4-en-1-yloxy)carbonyl)pyrrolidine-3-ca rboxylic acid, useful for stapling/stapled with another amino acid residue comprising an olefin group to form a staple through the olefin group
  SITE 12: note = (S)-2-amino-3-(thiophen-3-yl)propanoic acid
  SITE 13: note = (S)-2-amino-3-(benzo[b]thiophen-3-yl)propanoic acid
  SITE 14: note = L-glutamic acid, useful for stapling/stapled with another amino acid residue comprising a side chain amino group to form a staple through the 4-carboxyl group
  SITE 15: note = C-term amino
XDXXDXXAFKXXXEA

SEQ ID NO: 610 - protein, 15 aa, synthetic construct
  SITE 1: note = N-term Acetic Acid
  SITE 1: note = (R)-2-allylpyrrolidine-2-carboxylic acid, useful for stapling/stapled with another amino acid residue comprising an olefin group to form a staple through the olefin group
  SITE 3: note = (S)-2-amino-3-cyclohexylpropanoic acid
  VARIANT 4: note = 2-amino-2-(pent-4-en-1-yl)hept-6-enoic acid, useful for stapling/stapled with another amino acid residue comprising an olefin group to form a staple through one of the two olefin groups and/or with another amino acid residue comprising an olefin group to form a staple through the other of the two olefin groups
  SITE 6: note = (S)-3-(2-amino-2-carboxyethyl)benzoic acid
  SITE 7: note = 1-aminocyclobutane-1-carboxylic acid
  SITE 10: note = L-lysine, useful for stapling/stapled with another amino acid residue comprising a side chain acid group to form a staple through the 6-amino group
  SITE 11: note (S)-3-amino-1-((pent-4-en-1-yloxy)carbonyl)pyrrolidine-3-ca rboxylic acid, useful for stapling/stapled with another amino acid residue comprising an olefin group to form a staple through the olefin group
  SITE 12: note = (S)-2-amino-3-(thiophen-3-yl)propanoic acid
  SITE 13: note = (S)-2-amino-3-(benzo[b]thiophen-3-yl)propanoic acid
  SITE 14: note = L-glutamic acid, useful for stapling/stapled with another amino acid residue comprising a side chain amino group to form a staple through the 4-carboxyl group
  SITE 15: note = C-term amino
XDXXDXXAFKXXXEA

SEQ ID NO: 611 - protein, 15 aa, synthetic construct
  SITE 1: note = N-term Acetic Acid
  SITE 1: note = (R)-2-allylpyrrolidine-2-carboxylic acid, useful for stapling/stapled with another amino acid residue comprising an olefin group to form a staple through the olefin group
  SITE 3: note = (S)-2-amino-3-cyclobutylpropanoic acid
  VARIANT 4: note = 2-amino-2-(pent-4-en-1-yl)hept-6-enoic acid, useful for stapling/stapled with another amino acid residue comprising an olefin group to form a staple through one of the two olefin groups and/or with another amino acid residue comprising an olefin group to form a staple through the other of the two olefin groups
  SITE 6: note = (S)-3-(2-amino-2-carboxyethyl)benzoic acid
  SITE 7: note = 1-aminocyclobutane-1-carboxylic acid
  SITE 10: note = L-lysine, useful for stapling/stapled with another amino acid residue comprising a side chain acid group to form a staple through the 6-amino group
  SITE 11: note (S)-3-amino-1-((pent-4-en-1-yloxy)carbonyl)pyrrolidine-3-ca rboxylic acid, useful for stapling/stapled with another amino acid residue comprising an olefin group to form a staple through the olefin group
  SITE 12: note = (S)-2-amino-3-(thiophen-3-yl)propanoic acid
  SITE 13: note = (S)-2-amino-3-(benzo[b]thiophen-3-yl)propanoic acid
  SITE 14: note = L-glutamic acid, useful for stapling/stapled with another amino acid residue comprising a side chain amino group to form a staple through the 4-carboxyl group
  SITE 15: note = C-term amino
XDXXDXXAFKXXXEA

SEQ ID NO: 612 - protein, 15 aa, synthetic construct
  SITE 1: note = N-term Acetic Acid
  SITE 1: note = (R)-2-allylpyrrolidine-2-carboxylic acid, useful for stapling/stapled with another amino acid residue comprising an olefin group to form a staple through the olefin group
  SITE 3: note = (S)-2-aminohexanoic acid
  VARIANT 4: note = 2-amino-2-(pent-4-en-1-yl)hept-6-enoic acid, useful for stapling/stapled with another amino acid residue comprising an olefin group to form a staple through one of the two olefin groups and/or with another amino acid residue comprising an olefin group to form a staple through the other of the two olefin groups
  SITE 6: note = (S)-3-(2-amino-2-carboxyethyl)benzoic acid
  SITE 7: note = 1-aminocyclobutane-1-carboxylic acid
  SITE 10: note = L-lysine, useful for stapling/stapled with another amino acid residue comprising a side chain acid group to form a staple through the 6-amino group
  SITE 11: note (S)-3-amino-1-((pent-4-en-1-yloxy)carbonyl)pyrrolidine-3-ca rboxylic acid, useful for stapling/stapled with another amino acid residue comprising an olefin group to form a staple through the olefin group
  SITE 12: note = (S)-2-amino-3-(thiophen-3-yl)propanoic acid
  SITE 13: note = (S)-2-amino-3-(benzo[b]thiophen-3-yl)propanoic acid
  SITE 14: note = L-glutamic acid, useful for stapling/stapled with another amino acid residue comprising a side chain amino group to form a staple through the 4-carboxyl group
  SITE 15: note = C-term amino
XDXXDXXAFKXXXEA

SEQ ID NO: 613 - protein, 14 aa, synthetic construct
  SITE 1: note = N-term Acetic Acid
  SITE 1: note = (R)-2-allylpyrrolidine-2-carboxylic acid, useful for stapling/stapled with another amino acid residue comprising an olefin group to form a staple through the olefin group
  SITE 3: note = (S)-2-amino-4,4-dimethylpentanoic acid
  VARIANT 4: note = 2-amino-2-(pent-4-en-1-yl)hept-6-enoic acid, useful for stapling/stapled with another amino acid residue comprising an olefin group to form a staple through one of the two olefin groups and/or with another amino acid residue comprising an olefin group to form a staple through the other of the two olefin groups
  SITE 6: note = (S)-3-(2-amino-2-carboxyethyl)benzoic acid
  SITE 7: note = 2-amino-2-methylpropanoic acid
  SITE 10: note = L-lysine, useful for stapling/stapled with another amino acid residue comprising a side chain acid group to form a staple through the 6-amino group
  SITE 11: note (S)-3-amino-1-((pent-4-en-1-yloxy)carbonyl)pyrrolidine-3-ca rboxylic acid, useful for stapling/stapled with another amino acid residue comprising an olefin group to form a staple through the olefin group
  SITE 12: note = (S)-2-amino-3-(2-(trifluoromethyl)phenyl)propanoic acid
  SITE 13: note = (S)-2-amino-3-(3,4-dichlorophenyl)propanoic acid
  SITE 14: note = L-glutamic acid, useful for stapling/stapled with another amino acid residue comprising a side chain amino group to form a staple through the 4-carboxyl group
  SITE 14: note = C-term amino
XDXXDXXAFKXXXE

SEQ ID NO: 614 - protein, 15 aa, synthetic construct
  SITE 1: note = N-term Acetic Acid
  SITE 1: note = (R)-2-allylpyrrolidine-2-carboxylic acid, useful for stapling/stapled with another amino acid residue comprising an olefin group to form a staple through the olefin group
  SITE 3: note = (S)-2-amino-4,4-dimethylpentanoic acid
  VARIANT 4: note = 2-amino-2-(pent-4-en-1-yl)hept-6-enoic acid, useful for stapling/stapled with another amino acid residue comprising an olefin group to form a staple through one of the two olefin groups and/or with another amino acid residue comprising an olefin group to form a staple through the other of the two olefin groups
  SITE 6: note = (S)-3-(2-amino-2-carboxyethyl)benzoic acid
  SITE 7: note = 2-amino-2-methylpropanoic acid
  SITE 10: note = L-lysine, useful for stapling/stapled with another amino acid residue comprising a side chain acid group to form a staple through the 6-amino group
  SITE 11: note (S)-3-amino-1-((pent-4-en-1-yloxy)carbonyl)pyrrolidine-3-ca rboxylic acid, useful for stapling/stapled with another amino acid residue comprising an olefin group to form a staple through the olefin group
  SITE 12: note = (S)-2-amino-3-(2-(trifluoromethyl)phenyl)propanoic acid
  SITE 13: note = (S)-2-amino-3-(3,4-dichlorophenyl)propanoic acid
  SITE 14: note = L-glutamic acid, useful for stapling/stapled with another amino acid residue comprising a side chain amino group to form a staple through the 4-carboxyl group
  SITE 15: note = C-term amino
XDXXDXXAFKXXXEP

SEQ ID NO: 615 - protein, 15 aa, synthetic construct
  SITE 1: note = N-term Acetic Acid
  SITE 1: note = (R)-2-allylpyrrolidine-2-carboxylic acid, useful for stapling/stapled with another amino acid residue comprising an olefin group to form a staple through the olefin group
  SITE 3: note = (S)-2-amino-4,4-dimethylpentanoic acid
  VARIANT 4: note = 2-amino-2-(pent-4-en-1-yl)hept-6-enoic acid, useful for stapling/stapled with another amino acid residue comprising an olefin group to form a staple through one of the two olefin groups and/or with another amino acid residue comprising an olefin group to form a staple through the other of the two olefin groups
  SITE 6: note = (S)-3-(2-amino-2-carboxyethyl)benzoic acid
  SITE 7: note = 2-amino-2-methylpropanoic acid
  SITE 10: note = L-lysine, useful for stapling/stapled with another amino acid residue comprising a side chain acid group to form a staple through the 6-amino group
  SITE 11: note (S)-3-amino-1-((pent-4-en-1-yloxy)carbonyl)pyrrolidine-3-ca rboxylic acid, useful for stapling/stapled with another amino acid residue comprising an olefin group to form a staple through the olefin group
  SITE 12: note = (S)-2-amino-3-(2-(trifluoromethyl)phenyl)propanoic acid
  SITE 13: note = (S)-2-amino-3-(3,4-dichlorophenyl)propanoic acid
  SITE 14: note = L-glutamic acid, useful for stapling/stapled with another amino acid residue comprising a side chain amino group to form a staple through the 4-carboxyl group
  SITE 15: note = C-term amino
XDXXDXXAFKXXXES

SEQ ID NO: 616 - protein, 15 aa, synthetic construct
  SITE 1: note = N-term Acetic Acid
  SITE 1: note = (R)-2-allylpyrrolidine-2-carboxylic acid, useful for stapling/stapled with another amino acid residue comprising an olefin group to form a staple through the olefin group
  SITE 3: note = (S)-2-amino-4,4-dimethylpentanoic acid
  VARIANT 4: note = 2-amino-2-(pent-4-en-1-yl)hept-6-enoic acid, useful for stapling/stapled with another amino acid residue comprising an olefin group to form a staple through one of the two olefin groups and/or with another amino acid residue comprising an olefin group to form a staple through the other of the two olefin groups
  SITE 6: note = (S)-3-(2-amino-2-carboxyethyl)benzoic acid
  SITE 7: note = 2-amino-2-methylpropanoic acid
  SITE 10: note = L-lysine, useful for stapling/stapled with another amino acid residue comprising a side chain acid group to form a staple through the 6-amino group
  SITE 11: note (S)-3-amino-1-((pent-4-en-1-yloxy)carbonyl)pyrrolidine-3-ca rboxylic acid, useful for stapling/stapled with another amino acid residue comprising an olefin group to form a staple through the olefin group
  SITE 12: note = (S)-2-amino-3-(2-(trifluoromethyl)phenyl)propanoic acid
  SITE 13: note = (S)-2-amino-3-(3,4-dichlorophenyl)propanoic acid
  SITE 14: note = L-glutamic acid, useful for stapling/stapled with another amino acid residue comprising a side chain amino group to form a staple through the 4-carboxyl group
  SITE 15: note = C-term amino
XDXXDXXAFKXXXEF

SEQ ID NO: 617 - protein, 14 aa, synthetic construct
  SITE 1: note = N-term Acetic Acid
  SITE 1: note = (R)-2-allylpyrrolidine-2-carboxylic acid, useful for stapling/stapled with another amino acid residue comprising an olefin group to form a staple through the olefin group
  SITE 3: note = (S)-2-amino-4,4-dimethylpentanoic acid
  VARIANT 4: note = 2-amino-2-(pent-4-en-1-yl)hept-6-enoic acid, useful for stapling/stapled with another amino acid residue comprising an olefin group to form a staple through one of the two olefin groups and/or with another amino acid residue comprising an olefin group to form a staple through the other of the two olefin groups
  SITE 6: note = (S)-3-(2-amino-2-carboxyethyl)benzoic acid
  SITE 7: note = 2-amino-2-methylpropanoic acid
  SITE 10: note = L-lysine, useful for stapling/stapled with another amino acid residue comprising a side chain acid group to form a staple through the 6-amino group
  SITE 11: note (S)-3-amino-1-((pent-4-en-1-yloxy)carbonyl)pyrrolidine-3-ca rboxylic acid, useful for stapling/stapled with another amino acid residue comprising an olefin group to form a staple through the olefin group
  SITE 12: note = (S)-2-amino-3-(thiophen-3-yl)propanoic acid
  SITE 13: note = (S)-2-amino-3-(3,4-dichlorophenyl)propanoic acid
  SITE 14: note = L-glutamic acid, useful for stapling/stapled with another amino acid residue comprising a side chain amino group to form a staple through the 4-carboxyl group
  SITE 14: note = C-term amino
XDXXDXXAFKXXXE

SEQ ID NO: 618 - protein, 15 aa, synthetic construct
  SITE 1: note = N-term Acetic Acid
  SITE 1: note = (R)-2-allylpyrrolidine-2-carboxylic acid, useful for stapling/stapled with another amino acid residue comprising an olefin group to form a staple through the olefin group
  SITE 3: note = (S)-2-amino-4,4-dimethylpentanoic acid
  VARIANT 4: note = 2-amino-2-(pent-4-en-1-yl)hept-6-enoic acid, useful for stapling/stapled with another amino acid residue comprising an olefin group to form a staple through one of the two olefin groups and/or with another amino acid residue comprising an olefin group to form a staple through the other of the two olefin groups
  SITE 6: note = (S)-3-(2-amino-2-carboxyethyl)benzoic acid
  SITE 7: note = 2-amino-2-methylpropanoic acid
  SITE 10: note = L-lysine, useful for stapling/stapled with another amino acid residue comprising a side chain acid group to form a staple through the 6-amino group
  SITE 11: note (S)-3-amino-1-((pent-4-en-1-yloxy)carbonyl)pyrrolidine-3-ca rboxylic acid, useful for stapling/stapled with another amino acid residue comprising an olefin group to form a staple through the olefin group
  SITE 12: note = (S)-2-amino-3-(thiophen-3-yl)propanoic acid
  SITE 13: note = (S)-2-amino-3-(3,4-dichlorophenyl)propanoic acid
  SITE 14: note = L-glutamic acid, useful for stapling/stapled with another amino acid residue comprising a side chain amino group to form a staple through the 4-carboxyl group
  SITE 15: note = C-term amino
XDXXDXXAFKXXXEP

SEQ ID NO: 619 - protein, 15 aa, synthetic construct
  SITE 1: note = N-term Acetic Acid
  SITE 1: note = (R)-2-allylpyrrolidine-2-carboxylic acid, useful for stapling/stapled with another amino acid residue comprising an olefin group to form a staple through the olefin group
  SITE 3: note = (S)-2-amino-4,4-dimethylpentanoic acid
  VARIANT 4: note = 2-amino-2-(pent-4-en-1-yl)hept-6-enoic acid, useful for stapling/stapled with another amino acid residue comprising an olefin group to form a staple through one of the two olefin groups and/or with another amino acid residue comprising an olefin group to form a staple through the other of the two olefin groups
  SITE 6: note = (S)-3-(2-amino-2-carboxyethyl)benzoic acid
  SITE 7: note = 2-amino-2-methylpropanoic acid
  SITE 10: note = L-lysine, useful for stapling/stapled with another amino acid residue comprising a side chain acid group to form a staple through the 6-amino group
  SITE 11: note (S)-3-amino-1-((pent-4-en-1-yloxy)carbonyl)pyrrolidine-3-ca rboxylic acid, useful for stapling/stapled with another amino acid residue comprising an olefin group to form a staple through the olefin group
  SITE 12: note = (S)-2-amino-3-(thiophen-3-yl)propanoic acid
  SITE 13: note = (S)-2-amino-3-(3,4-dichlorophenyl)propanoic acid
  SITE 14: note = L-glutamic acid, useful for stapling/stapled with another amino acid residue comprising a side chain amino group to form a staple through the 4-carboxyl group
  SITE 15: note = C-term amino
XDXXDXXAFKXXXES

SEQ ID NO: 620 - protein, 15 aa, synthetic construct
  SITE 1: note = N-term Acetic Acid
  SITE 1: note = (R)-2-allylpyrrolidine-2-carboxylic acid, useful for stapling/stapled with another amino acid residue comprising an olefin group to form a staple through the olefin group
  SITE 3: note = (S)-2-amino-4,4-dimethylpentanoic acid
  VARIANT 4: note = 2-amino-2-(pent-4-en-1-yl)hept-6-enoic acid, useful for stapling/stapled with another amino acid residue comprising an olefin group to form a staple through one of the two olefin groups and/or with another amino acid residue comprising an olefin group to form a staple through the other of the two olefin groups
  SITE 6: note = (S)-3-(2-amino-2-carboxyethyl)benzoic acid
  SITE 7: note = 2-amino-2-methylpropanoic acid
  SITE 10: note = L-lysine, useful for stapling/stapled with another amino acid residue comprising a side chain acid group to form a staple through the 6-amino group
  SITE 11: note (S)-3-amino-1-((pent-4-en-1-yloxy)carbonyl)pyrrolidine-3-ca rboxylic acid, useful for stapling/stapled with another amino acid residue comprising an olefin group to form a staple through the olefin group
  SITE 12: note = (S)-2-amino-3-(thiophen-3-yl)propanoic acid
  SITE 13: note = (S)-2-amino-3-(3,4-dichlorophenyl)propanoic acid
  SITE 14: note = L-glutamic acid, useful for stapling/stapled with another amino acid residue comprising a side chain amino group to form a staple through the 4-carboxyl group
  SITE 15: note = C-term amino
XDXXDXXAFKXXXEF

SEQ ID NO: 621 - protein, 14 aa, synthetic construct
  SITE 1: note = N-term Acetic Acid
  SITE 1: note = (R)-2-allylpyrrolidine-2-carboxylic acid, useful for stapling/stapled with another amino acid residue comprising an olefin group to form a staple through the olefin group
  SITE 3: note = (S)-2-amino-4,4-dimethylpentanoic acid
  VARIANT 4: note = 2-amino-2-(pent-4-en-1-yl)hept-6-enoic acid, useful for stapling/stapled with another amino acid residue comprising an olefin group to form a staple through one of the two olefin groups and/or with another amino acid residue comprising an olefin group to form a staple through the other of the two olefin groups
  SITE 6: note = (S)-3-(2-amino-2-carboxyethyl)benzoic acid
  SITE 7: note = 2-amino-2-methylpropanoic acid
  SITE 10: note = L-lysine, useful for stapling/stapled with another amino acid residue comprising a side chain acid group to form a staple through the 6-amino group
  SITE 11: note (S)-3-amino-1-((pent-4-en-1-yloxy)carbonyl)pyrrolidine-3-ca rboxylic acid, useful for stapling/stapled with another amino acid residue comprising an olefin group to form a staple through the olefin group
  SITE 13: note = (S)-2-amino-3-(3,4-dichlorophenyl)propanoic acid
  SITE 14: note = L-glutamic acid, useful for stapling/stapled with another amino acid residue comprising a side chain amino group to form a staple through the 4-carboxyl group
  SITE 14: note = C-term amino
XDXXDXXAFKXFXE

SEQ ID NO: 622 - protein, 15 aa, synthetic construct
  SITE 1: note = N-term Acetic Acid
  SITE 1: note = (R)-2-allylpyrrolidine-2-carboxylic acid, useful for stapling/stapled with another amino acid residue comprising an olefin group to form a staple through the olefin group
  SITE 3: note = (S)-2-amino-4,4-dimethylpentanoic acid
  VARIANT 4: note = 2-amino-2-(pent-4-en-1-yl)hept-6-enoic acid, useful for stapling/stapled with another amino acid residue comprising an olefin group to form a staple through one of the two olefin groups and/or with another amino acid residue comprising an olefin group to form a staple through the other of the two olefin groups
  SITE 6: note = (S)-3-(2-amino-2-carboxyethyl)benzoic acid
  SITE 7: note = 2-amino-2-methylpropanoic acid
  SITE 10: note = L-lysine, useful for stapling/stapled with another amino acid residue comprising a side chain acid group to form a staple through the 6-amino group
  SITE 11: note (S)-3-amino-1-((pent-4-en-1-yloxy)carbonyl)pyrrolidine-3-ca rboxylic acid, useful for stapling/stapled with another amino acid residue comprising an olefin group to form a staple through the olefin group
  SITE 13: note = (S)-2-amino-3-(3,4-dichlorophenyl)propanoic acid
  SITE 14: note = L-glutamic acid, useful for stapling/stapled with another amino acid residue comprising a side chain amino group to form a staple through the 4-carboxyl group
  SITE 15: note = C-term amino
XDXXDXXAFKXFXEP

SEQ ID NO: 623 - protein, 15 aa, synthetic construct
  SITE 1: note = N-term Acetic Acid
  SITE 1: note = (R)-2-allylpyrrolidine-2-carboxylic acid, useful for stapling/stapled with another amino acid residue comprising an olefin group to form a staple through the olefin group
  SITE 3: note = (S)-2-amino-4,4-dimethylpentanoic acid
  VARIANT 4: note = 2-amino-2-(pent-4-en-1-yl)hept-6-enoic acid, useful for stapling/stapled with another amino acid residue comprising an olefin group to form a staple through one of the two olefin groups and/or with another amino acid residue comprising an olefin group to form a staple through the other of the two olefin groups
  SITE 6: note = (S)-3-(2-amino-2-carboxyethyl)benzoic acid
  SITE 7: note = 2-amino-2-methylpropanoic acid
  SITE 10: note = L-lysine, useful for stapling/stapled with another amino acid residue comprising a side chain acid group to form a staple through the 6-amino group
  SITE 11: note (S)-3-amino-1-((pent-4-en-1-yloxy)carbonyl)pyrrolidine-3-ca rboxylic acid, useful for stapling/stapled with another amino acid residue comprising an olefin group to form a staple through the olefin group
  SITE 13: note = (S)-2-amino-3-(3,4-dichlorophenyl)propanoic acid
  SITE 14: note = L-glutamic acid, useful for stapling/stapled with another amino acid residue comprising a side chain amino group to form a staple through the 4-carboxyl group
  SITE 15: note = C-term amino
XDXXDXXAFKXFXES

SEQ ID NO: 624 - protein, 15 aa, synthetic construct
  SITE 1: note = N-term Acetic Acid
  SITE 1: note = (R)-2-allylpyrrolidine-2-carboxylic acid, useful for stapling/stapled with another amino acid residue comprising an olefin group to form a staple through the olefin group
  SITE 3: note = (S)-2-amino-4,4-dimethylpentanoic acid
  VARIANT 4: note = 2-amino-2-(pent-4-en-1-yl)hept-6-enoic acid, useful for stapling/stapled with another amino acid residue comprising an olefin group to form a staple through one of the two olefin groups and/or with another amino acid residue comprising an olefin group to form a staple through the other of the two olefin groups
  SITE 6: note = (S)-3-(2-amino-2-carboxyethyl)benzoic acid
  SITE 7: note = 2-amino-2-methylpropanoic acid
  SITE 10: note = L-lysine, useful for stapling/stapled with another amino acid residue comprising a side chain acid group to form a staple through the 6-amino group
  SITE 11: note (S)-3-amino-1-((pent-4-en-1-yloxy)carbonyl)pyrrolidine-3-ca rboxylic acid, useful for stapling/stapled with another amino acid residue comprising an olefin group to form a staple through the olefin group
  SITE 13: note = (S)-2-amino-3-(3,4-dichlorophenyl)propanoic acid
  SITE 14: note = L-glutamic acid, useful for stapling/stapled with another amino acid residue comprising a side chain amino group to form a staple through the 4-carboxyl group
  SITE 15: note = C-term amino
XDXXDXXAFKXFXEF

SEQ ID NO: 625 - protein, 14 aa, synthetic construct
  SITE 1: note = N-term Acetic Acid
  SITE 1: note = (R)-2-allylpyrrolidine-2-carboxylic acid, useful for stapling/stapled with another amino acid residue comprising an olefin group to form a staple through the olefin group
  SITE 3: note = (S)-2-amino-4,4-dimethylpentanoic acid
  VARIANT 4: note = 2-amino-2-(pent-4-en-1-yl)hept-6-enoic acid, useful for stapling/stapled with another amino acid residue comprising an olefin group to form a staple through one of the two olefin groups and/or with another amino acid residue comprising an olefin group to form a staple through the other of the two olefin groups
  SITE 6: note (S)-2-amino-3-((carboxymethyl)(2,2,2-trifluoroethyl)amino) propanoic acid
  SITE 7: note = 2-amino-2-methylpropanoic acid
  SITE 10: note = L-lysine, useful for stapling/stapled with another amino acid residue comprising a side chain acid group to form a staple through the 6-amino group
  SITE 11: note (S)-3-amino-1-((pent-4-en-1-yloxy)carbonyl)pyrrolidine-3-ca rboxylic acid, useful for stapling/stapled with another amino acid residue comprising an olefin group to form a staple through the olefin group
  SITE 12: note = (S)-2-amino-3-(thiophen-3-yl)propanoic acid
  SITE 13: note = (S)-2-amino-3-(benzo[b]thiophen-3-yl)propanoic acid
  SITE 14: note = L-glutamic acid, useful for stapling/stapled with another amino acid residue comprising a side chain amino group to form a staple through the 4-carboxyl group
  SITE 14: note = C-term amino
XDXXDXXAFKXXXE

SEQ ID NO: 626 - protein, 15 aa, synthetic construct
  SITE 1: note = N-term Acetic Acid
  SITE 1: note = (R)-2-allylpyrrolidine-2-carboxylic acid, useful for stapling/stapled with another amino acid residue comprising an olefin group to form a staple through the olefin group
  SITE 3: note = (S)-2-amino-4,4-dimethylpentanoic acid
  VARIANT 4: note = 2-amino-2-(pent-4-en-1-yl)hept-6-enoic acid, useful for stapling/stapled with another amino acid residue comprising an olefin group to form a staple through one of the two olefin groups and/or with another amino acid residue comprising an olefin group to form a staple through the other of the two olefin groups
  SITE 6: note (S)-2-amino-3-((carboxymethyl)(2,2,2-trifluoroethyl)amino) propanoic acid
  SITE 7: note = 2-amino-2-methylpropanoic acid
  SITE 10: note = L-lysine, useful for stapling/stapled with another amino acid residue comprising a side chain acid group to form a staple through the 6-amino group
  SITE 11: note (S)-3-amino-1-((pent-4-en-1-yloxy)carbonyl)pyrrolidine-3-ca rboxylic acid, useful for stapling/stapled with another amino acid residue comprising an olefin group to form a staple through the olefin group
  SITE 12: note = (S)-2-amino-3-(thiophen-3-yl)propanoic acid
  SITE 13: note = (S)-2-amino-3-(benzo[b]thiophen-3-yl)propanoic acid
  SITE 14: note = L-glutamic acid, useful for stapling/stapled with another amino acid residue comprising a side chain amino group to form a staple through the 4-carboxyl group
  SITE 15: note = C-term amino
XDXXDXXAFKXXXEA

SEQ ID NO: 627 - protein, 16 aa, synthetic construct
  SITE 1: note = N-term Acetic Acid
  SITE 1: note = (R)-2-allylpyrrolidine-2-carboxylic acid, useful for stapling/stapled with another amino acid residue comprising an olefin group to form a staple through the olefin group
  SITE 3: note = (S)-2-amino-4,4-dimethylpentanoic acid
  VARIANT 4: note = 2-amino-2-(pent-4-en-1-yl)hept-6-enoic acid, useful for stapling/stapled with another amino acid residue comprising an olefin group to form a staple through one of the two olefin groups and/or with another amino acid residue comprising an olefin group to form a staple through the other of the two olefin groups
  SITE 6: note (S)-2-amino-3-((carboxymethyl)(2,2,2-trifluoroethyl)amino) propanoic acid
  SITE 7: note = 2-amino-2-methylpropanoic acid
  SITE 10: note = L-lysine, useful for stapling/stapled with another amino acid residue comprising a side chain acid group to form a staple through the 6-amino group
  SITE 11: note (S)-3-amino-1-((pent-4-en-1-yloxy)carbonyl)pyrrolidine-3-ca rboxylic acid, useful for stapling/stapled with another amino acid residue comprising an olefin group to form a staple through the olefin group
  SITE 12: note = (S)-2-amino-3-(thiophen-3-yl)propanoic acid
  SITE 13: note = (S)-2-amino-3-(benzo[b]thiophen-3-yl)propanoic acid
  SITE 14: note = L-glutamic acid, useful for stapling/stapled with another amino acid residue comprising a side chain amino group to form a staple through the 4-carboxyl group
  SITE 16: note = C-term amino
XDXXDXXAFKXXXELS

SEQ ID NO: 628 - protein, 14 aa, synthetic construct
  SITE 1: note = N-term Acetic Acid
  SITE 1: note = (R)-2-allylpyrrolidine-2-carboxylic acid, useful for stapling/stapled with another amino acid residue comprising an olefin group to form a staple through the olefin group
  SITE 3: note = (S)-2-amino-4,4-dimethylpentanoic acid
  VARIANT 4: note = 2-amino-2-(pent-4-en-1-yl)hept-6-enoic acid, useful for stapling/stapled with another amino acid residue comprising an olefin group to form a staple through one of the two olefin groups and/or with another amino acid residue comprising an olefin group to form a staple through the other of the two olefin groups
  SITE 6: note (S)-2-amino-3-((carboxymethyl)(2,2,2-trifluoroethyl)amino) propanoic acid
  SITE 7: note = 2-amino-2-methylpropanoic acid
  SITE 10: note = L-lysine, useful for stapling/stapled with another amino acid residue comprising a side chain acid group to form a staple through the 6-amino group
  SITE 11: note (S)-3-amino-1-((pent-4-en-1-yloxy)carbonyl)pyrrolidine-3-ca rboxylic acid, useful for stapling/stapled with another amino acid residue comprising an olefin group to form a staple through the olefin group
  SITE 13: note = (S)-2-amino-3-(benzo[b]thiophen-3-yl)propanoic acid
  SITE 14: note = L-glutamic acid, useful for stapling/stapled with another amino acid residue comprising a side chain amino group to form a staple through the 4-carboxyl group
  SITE 14: note = C-term amino
XDXXDXXAFKXFXE

SEQ ID NO: 629 - protein, 15 aa, synthetic construct
  SITE 1: note = N-term Acetic Acid
  SITE 1: note = (R)-2-allylpyrrolidine-2-carboxylic acid, useful for stapling/stapled with another amino acid residue comprising an olefin group to form a staple through the olefin group
  SITE 3: note = (S)-2-amino-4,4-dimethylpentanoic acid
  VARIANT 4: note = 2-amino-2-(pent-4-en-1-yl)hept-6-enoic acid, useful for stapling/stapled with another amino acid residue comprising an olefin group to form a staple through one of the two olefin groups and/or with another amino acid residue comprising an olefin group to form a staple through the other of the two olefin groups
  SITE 6: note (S)-2-amino-3-((carboxymethyl)(2,2,2-trifluoroethyl)amino) propanoic acid
  SITE 7: note = 2-amino-2-methylpropanoic acid
  SITE 10: note = L-lysine, useful for stapling/stapled with another amino acid residue comprising a side chain acid group to form a staple through the 6-amino group
  SITE 11: note (S)-3-amino-1-((pent-4-en-1-yloxy)carbonyl)pyrrolidine-3-ca rboxylic acid, useful for stapling/stapled with another amino acid residue comprising an olefin group to form a staple through the olefin group
  SITE 13: note = (S)-2-amino-3-(benzo[b]thiophen-3-yl)propanoic acid
  SITE 14: note = L-glutamic acid, useful for stapling/stapled with another amino acid residue comprising a side chain amino group to form a staple through the 4-carboxyl group
  SITE 15: note = C-term amino
XDXXDXXAFKXFXEA

SEQ ID NO: 630 - protein, 16 aa, synthetic construct
  SITE 1: note = N-term Acetic Acid
  SITE 1: note = (R)-2-allylpyrrolidine-2-carboxylic acid, useful for stapling/stapled with another amino acid residue comprising an olefin group to form a staple through the olefin group
  SITE 3: note = (S)-2-amino-4,4-dimethylpentanoic acid
  VARIANT 4: note = 2-amino-2-(pent-4-en-1-yl)hept-6-enoic acid, useful for stapling/stapled with another amino acid residue comprising an olefin group to form a staple through one of the two olefin groups and/or with another amino acid residue comprising an olefin group to form a staple through the other of the two olefin groups
  SITE 6: note (S)-2-amino-3-((carboxymethyl)(2,2,2-trifluoroethyl)amino) propanoic acid
  SITE 7: note = 2-amino-2-methylpropanoic acid
  SITE 10: note = L-lysine, useful for stapling/stapled with another amino acid residue comprising a side chain acid group to form a staple through the 6-amino group
  SITE 11: note (S)-3-amino-1-((pent-4-en-1-yloxy)carbonyl)pyrrolidine-3-ca rboxylic acid, useful for stapling/stapled with another amino acid residue comprising an olefin group to form a staple through the olefin group
  SITE 13: note = (S)-2-amino-3-(benzo[b]thiophen-3-yl)propanoic acid
  SITE 14: note = L-glutamic acid, useful for stapling/stapled with another amino acid residue comprising a side chain amino group to form a staple through the 4-carboxyl group
  SITE 16: note = C-term amino
XDXXDXXAFKXFXELS

SEQ ID NO: 631 - protein, 14 aa, synthetic construct
  SITE 1: note = N-term Acetic Acid
  SITE 1: note = (R)-2-allylpyrrolidine-2-carboxylic acid, useful for stapling/stapled with another amino acid residue comprising an olefin group to form a staple through the olefin group
  SITE 3: note = (S)-2-amino-4,4-dimethylpentanoic acid
  VARIANT 4: note = 2-amino-2-(pent-4-en-1-yl)hept-6-enoic acid, useful for stapling/stapled with another amino acid residue comprising an olefin group to form a staple through one of the two olefin groups and/or with another amino acid residue comprising an olefin group to form a staple through the other of the two olefin groups
  SITE 6: note (S)-2-amino-3-((carboxymethyl)(2,2,2-trifluoroethyl)amino) propanoic acid
  SITE 7: note = 2-amino-2-methylpropanoic acid
  SITE 10: note = L-lysine, useful for stapling/stapled with another amino acid residue comprising a side chain acid group to form a staple through the 6-amino group
  SITE 11: note (S)-3-amino-1-((pent-4-en-1-yloxy)carbonyl)pyrrolidine-3-ca rboxylic acid, useful for stapling/stapled with another amino acid residue comprising an olefin group to form a staple through the olefin group
  SITE 12: note = (S)-2-amino-3-(thiophen-3-yl)propanoic acid
  SITE 13: note = (S)-2-amino-3-(3,4-dichlorophenyl)propanoic acid
  SITE 14: note = L-glutamic acid, useful for stapling/stapled with another amino acid residue comprising a side chain amino group to form a staple through the 4-carboxyl group
  SITE 14: note = C-term amino
XDXXDXXAFKXXXE

SEQ ID NO: 632 - protein, 15 aa, synthetic construct
  SITE 1: note = N-term Acetic Acid
  SITE 1: note = (R)-2-allylpyrrolidine-2-carboxylic acid, useful for stapling/stapled with another amino acid residue comprising an olefin group to form a staple through the olefin group
  SITE 3: note = (S)-2-amino-4,4-dimethylpentanoic acid
  VARIANT 4: note = 2-amino-2-(pent-4-en-1-yl)hept-6-enoic acid, useful for stapling/stapled with another amino acid residue comprising an olefin group to form a staple through one of the two olefin groups and/or with another amino acid residue comprising an olefin group to form a staple through the other of the two olefin groups
  SITE 6: note (S)-2-amino-3-((carboxymethyl)(2,2,2-trifluoroethyl)amino) propanoic acid
  SITE 7: note = 2-amino-2-methylpropanoic acid
  SITE 10: note = L-lysine, useful for stapling/stapled with another amino acid residue comprising a side chain acid group to form a staple through the 6-amino group
  SITE 11: note (S)-3-amino-1-((pent-4-en-1-yloxy)carbonyl)pyrrolidine-3-ca rboxylic acid, useful for stapling/stapled with another amino acid residue comprising an olefin group to form a staple through the olefin group
  SITE 12: note = (S)-2-amino-3-(thiophen-3-yl)propanoic acid
  SITE 13: note = (S)-2-amino-3-(3,4-dichlorophenyl)propanoic acid
  SITE 14: note = L-glutamic acid, useful for stapling/stapled with another amino acid residue comprising a side chain amino group to form a staple through the 4-carboxyl group
  SITE 15: note = C-term amino
XDXXDXXAFKXXXEA

SEQ ID NO: 633 - protein, 16 aa, synthetic construct
  SITE 1: note = N-term Acetic Acid
  SITE 1: note = (R)-2-allylpyrrolidine-2-carboxylic acid, useful for stapling/stapled with another amino acid residue comprising an olefin group to form a staple through the olefin group
  SITE 3: note = (S)-2-amino-4,4-dimethylpentanoic acid
  VARIANT 4: note = 2-amino-2-(pent-4-en-1-yl)hept-6-enoic acid, useful for stapling/stapled with another amino acid residue comprising an olefin group to form a staple through one of the two olefin groups and/or with another amino acid residue comprising an olefin group to form a staple through the other of the two olefin groups
  SITE 6: note (S)-2-amino-3-((carboxymethyl)(2,2,2-trifluoroethyl)amino) propanoic acid
  SITE 7: note = 2-amino-2-methylpropanoic acid
  SITE 10: note = L-lysine, useful for stapling/stapled with another amino acid residue comprising a side chain acid group to form a staple through the 6-amino group
  SITE 11: note (S)-3-amino-1-((pent-4-en-1-yloxy)carbonyl)pyrrolidine-3-ca rboxylic acid, useful for stapling/stapled with another amino acid residue comprising an olefin group to form a staple through the olefin group
  SITE 12: note = (S)-2-amino-3-(thiophen-3-yl)propanoic acid
  SITE 13: note = (S)-2-amino-3-(3,4-dichlorophenyl)propanoic acid
  SITE 14: note = L-glutamic acid, useful for stapling/stapled with another amino acid residue comprising a side chain amino group to form a staple through the 4-carboxyl group
  SITE 16: note = C-term amino
XDXXDXXAFKXXXELS

SEQ ID NO: 634 - protein, 14 aa, synthetic construct
  SITE 1: note = N-term Acetic Acid
  SITE 1: note = (R)-2-allylpyrrolidine-2-carboxylic acid, useful for stapling/stapled with another amino acid residue comprising an olefin group to form a staple through the olefin group
  SITE 3: note = (S)-2-amino-4,4-dimethylpentanoic acid
  VARIANT 4: note = 2-amino-2-(pent-4-en-1-yl)hept-6-enoic acid, useful for stapling/stapled with another amino acid residue comprising an olefin group to form a staple through one of the two olefin groups and/or with another amino acid residue comprising an olefin group to form a staple through the other of the two olefin groups
  SITE 6: note (S)-2-amino-3-((carboxymethyl)(2,2,2-trifluoroethyl)amino) propanoic acid
  SITE 7: note = 2-amino-2-methylpropanoic acid
  SITE 10: note = L-lysine, useful for stapling/stapled with another amino acid residue comprising a side chain acid group to form a staple through the 6-amino group
  SITE 11: note (S)-3-amino-1-((pent-4-en-1-yloxy)carbonyl)pyrrolidine-3-ca rboxylic acid, useful for stapling/stapled with another amino acid residue comprising an olefin group to form a staple through the olefin group
  SITE 13: note = (S)-2-amino-3-(3,4-dichlorophenyl)propanoic acid
  SITE 14: note = L-glutamic acid, useful for stapling/stapled with another amino acid residue comprising a side chain amino group to form a staple through the 4-carboxyl group
  SITE 14: note = C-term amino
XDXXDXXAFKXFXE

SEQ ID NO: 635 - protein, 15 aa, synthetic construct
  SITE 1: note = N-term Acetic Acid
  SITE 1: note = (R)-2-allylpyrrolidine-2-carboxylic acid, useful for stapling/stapled with another amino acid residue comprising an olefin group to form a staple through the olefin group
  SITE 3: note = (S)-2-amino-4,4-dimethylpentanoic acid
  VARIANT 4: note = 2-amino-2-(pent-4-en-1-yl)hept-6-enoic acid, useful for stapling/stapled with another amino acid residue comprising an olefin group to form a staple through one of the two olefin groups and/or with another amino acid residue comprising an olefin group to form a staple through the other of the two olefin groups
  SITE 6: note (S)-2-amino-3-((carboxymethyl)(2,2,2-trifluoroethyl)amino) propanoic acid
  SITE 7: note = 2-amino-2-methylpropanoic acid
  SITE 10: note = L-lysine, useful for stapling/stapled with another amino acid residue comprising a side chain acid group to form a staple through the 6-amino group
  SITE 11: note (S)-3-amino-1-((pent-4-en-1-yloxy)carbonyl)pyrrolidine-3-ca rboxylic acid, useful for stapling/stapled with another amino acid residue comprising an olefin group to form a staple through the olefin group
  SITE 13: note = (S)-2-amino-3-(3,4-dichlorophenyl)propanoic acid
  SITE 14: note = L-glutamic acid, useful for stapling/stapled with another amino acid residue comprising a side chain amino group to form a staple through the 4-carboxyl group
  SITE 15: note = C-term amino
XDXXDXXAFKXFXEA

SEQ ID NO: 636 - protein, 16 aa, synthetic construct
  SITE 1: note = N-term Acetic Acid
  SITE 1: note = (R)-2-allylpyrrolidine-2-carboxylic acid, useful for stapling/stapled with another amino acid residue comprising an olefin group to form a staple through the olefin group
  SITE 3: note = (S)-2-amino-4,4-dimethylpentanoic acid
  VARIANT 4: note = 2-amino-2-(pent-4-en-1-yl)hept-6-enoic acid, useful for stapling/stapled with another amino acid residue comprising an olefin group to form a staple through one of the two olefin groups and/or with another amino acid residue comprising an olefin group to form a staple through the other of the two olefin groups
  SITE 6: note (S)-2-amino-3-((carboxymethyl)(2,2,2-trifluoroethyl)amino) propanoic acid
  SITE 7: note = 2-amino-2-methylpropanoic acid
  SITE 10: note = L-lysine, useful for stapling/stapled with another amino acid residue comprising a side chain acid group to form a staple through the 6-amino group
  SITE 11: note (S)-3-amino-1-((pent-4-en-1-yloxy)carbonyl)pyrrolidine-3-ca rboxylic acid, useful for stapling/stapled with another amino acid residue comprising an olefin group to form a staple through the olefin group
  SITE 13: note = (S)-2-amino-3-(3,4-dichlorophenyl)propanoic acid
  SITE 14: note = L-glutamic acid, useful for stapling/stapled with another amino acid residue comprising a side chain amino group to form a staple through the 4-carboxyl group
  SITE 16: note = C-term amino
XDXXDXXAFKXFXELS

SEQ ID NO: 637 - protein, 14 aa, synthetic construct
  SITE 1: note = N-term Acetic Acid
  SITE 1: note = (R)-2-allylpyrrolidine-2-carboxylic acid, useful for stapling/stapled with another amino acid residue comprising an olefin group to form a staple through the olefin group
  SITE 3: note = (S)-2-amino-4,4-dimethylpentanoic acid
  VARIANT 4: note = 2-amino-2-(pent-4-en-1-yl)hept-6-enoic acid, useful for stapling/stapled with another amino acid residue comprising an olefin group to form a staple through one of the two olefin groups and/or with another amino acid residue comprising an olefin group to form a staple through the other of the two olefin groups
  SITE 6: note (S)-2-amino-3-((carboxymethyl)(2,2,2-trifluoroethyl)amino) propanoic acid
  SITE 7: note = 2-amino-2-methylpropanoic acid
  SITE 10: note = L-lysine, useful for stapling/stapled with another amino acid residue comprising a side chain acid group to form a staple through the 6-amino group
  SITE 11: note (S)-3-amino-1-((pent-4-en-1-yloxy)carbonyl)pyrrolidine-3-ca rboxylic acid, useful for stapling/stapled with another amino acid residue comprising an olefin group to form a staple through the olefin group
  SITE 12: note = (S)-2-amino-3-(2-(trifluoromethyl)phenyl)propanoic acid
  SITE 13: note = (S)-2-amino-3-(benzo[b]thiophen-3-yl)propanoic acid
  SITE 14: note = L-glutamic acid, useful for stapling/stapled with another amino acid residue comprising a side chain amino group to form a staple through the 4-carboxyl group
  SITE 14: note = C-term amino
XDXXDXXAFKXXXE

SEQ ID NO: 638 - protein, 16 aa, synthetic construct
  SITE 1: note = N-term Acetic Acid
  SITE 1: note = (R)-2-allylpyrrolidine-2-carboxylic acid, useful for stapling/stapled with another amino acid residue comprising an olefin group to form a staple through the olefin group
  SITE 3: note = (S)-2-amino-4,4-dimethylpentanoic acid
  VARIANT 4: note = 2-amino-2-(pent-4-en-1-yl)hept-6-enoic acid, useful for stapling/stapled with another amino acid residue comprising an olefin group to form a staple through one of the two olefin groups and/or with another amino acid residue comprising an olefin group to form a staple through the other of the two olefin groups
  SITE 6: note (S)-2-amino-3-((carboxymethyl)(2,2,2-trifluoroethyl)amino) propanoic acid
  SITE 7: note = 2-amino-2-methylpropanoic acid
  SITE 10: note = L-lysine, useful for stapling/stapled with another amino acid residue comprising a side chain acid group to form a staple through the 6-amino group
  SITE 11: note (S)-3-amino-1-((pent-4-en-1-yloxy)carbonyl)pyrrolidine-3-ca rboxylic acid, useful for stapling/stapled with another amino acid residue comprising an olefin group to form a staple through the olefin group
  SITE 12: note = (S)-2-amino-3-(2-(trifluoromethyl)phenyl)propanoic acid
  SITE 13: note = (S)-2-amino-3-(benzo[b]thiophen-3-yl)propanoic acid
  SITE 14: note = L-glutamic acid, useful for stapling/stapled with another amino acid residue comprising a side chain amino group to form a staple through the 4-carboxyl group
  SITE 16: note = C-term amino
XDXXDXXAFKXXXELS

SEQ ID NO: 639 - protein, 14 aa, synthetic construct
  SITE 1: note = N-term Acetic Acid
  SITE 1: note = (R)-2-allylpyrrolidine-2-carboxylic acid, useful for stapling/stapled with another amino acid residue comprising an olefin group to form a staple through the olefin group
  SITE 3: note = (S)-2-amino-4,4-dimethylpentanoic acid
  VARIANT 4: note = 2-amino-2-(pent-4-en-1-yl)hept-6-enoic acid, useful for stapling/stapled with another amino acid residue comprising an olefin group to form a staple through one of the two olefin groups and/or with another amino acid residue comprising an olefin group to form a staple through the other of the two olefin groups
  SITE 6: note (S)-2-amino-3-((carboxymethyl)(2,2,2-trifluoroethyl)amino) propanoic acid
  SITE 7: note = 2-amino-2-methylpropanoic acid
  SITE 10: note = L-lysine, useful for stapling/stapled with another amino acid residue comprising a side chain acid group to form a staple through the 6-amino group
  SITE 11: note (S)-3-amino-1-((pent-4-en-1-yloxy)carbonyl)pyrrolidine-3-ca rboxylic acid, useful for stapling/stapled with another amino acid residue comprising an olefin group to form a staple through the olefin group
  SITE 12: note = (S)-2-amino-3-(2-(trifluoromethyl)phenyl)propanoic acid
  SITE 13: note = (S)-2-amino-3-(3,4-dichlorophenyl)propanoic acid
  SITE 14: note = L-glutamic acid, useful for stapling/stapled with another amino acid residue comprising a side chain amino group to form a staple through the 4-carboxyl group
  SITE 14: note = C-term amino
XDXXDXXAFKXXXE

SEQ ID NO: 640 - protein, 15 aa, synthetic construct
  SITE 1: note = N-term Acetic Acid
  SITE 1: note = (R)-2-allylpyrrolidine-2-carboxylic acid, useful for stapling/stapled with another amino acid residue comprising an olefin group to form a staple through the olefin group
  SITE 3: note = (S)-2-amino-4,4-dimethylpentanoic acid
  VARIANT 4: note = 2-amino-2-(pent-4-en-1-yl)hept-6-enoic acid, useful for stapling/stapled with another amino acid residue comprising an olefin group to form a staple through one of the two olefin groups and/or with another amino acid residue comprising an olefin group to form a staple through the other of the two olefin groups
  SITE 6: note (S)-2-amino-3-((carboxymethyl)(2,2,2-trifluoroethyl)amino) propanoic acid
  SITE 7: note = 2-amino-2-methylpropanoic acid
  SITE 10: note = L-lysine, useful for stapling/stapled with another amino acid residue comprising a side chain acid group to form a staple through the 6-amino group
  SITE 11: note (S)-3-amino-1-((pent-4-en-1-yloxy)carbonyl)pyrrolidine-3-ca rboxylic acid, useful for stapling/stapled with another amino acid residue comprising an olefin group to form a staple through the olefin group
  SITE 12: note = (S)-2-amino-3-(2-(trifluoromethyl)phenyl)propanoic acid
  SITE 13: note = (S)-2-amino-3-(3,4-dichlorophenyl)propanoic acid
  SITE 14: note = L-glutamic acid, useful for stapling/stapled with another amino acid residue comprising a side chain amino group to form a staple through the 4-carboxyl group
  SITE 15: note = C-term amino
XDXXDXXAFKXXXEA

SEQ ID NO: 641 - protein, 16 aa, synthetic construct
  SITE 1: note = N-term Acetic Acid
  SITE 1: note = (R)-2-allylpyrrolidine-2-carboxylic acid, useful for stapling/stapled with another amino acid residue comprising an olefin group to form a staple through the olefin group
  SITE 3: note = (S)-2-amino-4,4-dimethylpentanoic acid
  VARIANT 4: note = 2-amino-2-(pent-4-en-1-yl)hept-6-enoic acid, useful for stapling/stapled with another amino acid residue comprising an olefin group to form a staple through one of the two olefin groups and/or with another amino acid residue comprising an olefin group to form a staple through the other of the two olefin groups
  SITE 6: note (S)-2-amino-3-((carboxymethyl)(2,2,2-trifluoroethyl)amino) propanoic acid
  SITE 7: note = 2-amino-2-methylpropanoic acid
  SITE 10: note = L-lysine, useful for stapling/stapled with another amino acid residue comprising a side chain acid group to form a staple through the 6-amino group
  SITE 11: note (S)-3-amino-1-((pent-4-en-1-yloxy)carbonyl)pyrrolidine-3-ca rboxylic acid, useful for stapling/stapled with another amino acid residue comprising an olefin group to form a staple through the olefin group
  SITE 12: note = (S)-2-amino-3-(2-(trifluoromethyl)phenyl)propanoic acid
  SITE 13: note = (S)-2-amino-3-(3,4-dichlorophenyl)propanoic acid
  SITE 14: note = L-glutamic acid, useful for stapling/stapled with another amino acid residue comprising a side chain amino group to form a staple through the 4-carboxyl group
  SITE 16: note = C-term amino
XDXXDXXAFKXXXELS

SEQ ID NO: 642 - protein, 14 aa, synthetic construct
  SITE 1: note = N-term Acetic Acid
  SITE 1: note = (R)-2-allylpyrrolidine-2-carboxylic acid, useful for stapling/stapled with another amino acid residue comprising an olefin group to form a staple through the olefin group
  SITE 3: note = (S)-2-amino-4,4-dimethylpentanoic acid
  VARIANT 4: note = 2-amino-2-(pent-4-en-1-yl)hept-6-enoic acid, useful for stapling/stapled with another amino acid residue comprising an olefin group to form a staple through one of the two olefin groups and/or with another amino acid residue comprising an olefin group to form a staple through the other of the two olefin groups
  SITE 6: note (S)-2-amino-3-((carboxymethyl)(2,2,2-trifluoroethyl)amino) propanoic acid
  SITE 10: note = L-lysine, useful for stapling/stapled with another amino acid residue comprising a side chain acid group to form a staple through the 6-amino group
  SITE 11: note (S)-3-amino-1-((pent-4-en-1-yloxy)carbonyl)pyrrolidine-3-ca rboxylic acid, useful for stapling/stapled with another amino acid residue comprising an olefin group to form a staple through the olefin group
  SITE 13: note = (S)-2-amino-3-(benzo[b]thiophen-3-yl)propanoic acid
  SITE 14: note = L-glutamic acid, useful for stapling/stapled with another amino acid residue comprising a side chain amino group to form a staple through the 4-carboxyl group
  SITE 14: note = C-term amino
XDXXDXAAFKXFXE

SEQ ID NO: 643 - protein, 15 aa, synthetic construct
  SITE 1: note = N-term Acetic Acid
  SITE 1: note = (R)-2-allylpyrrolidine-2-carboxylic acid, useful for stapling/stapled with another amino acid residue comprising an olefin group to form a staple through the olefin group
  SITE 3: note = (S)-2-amino-4,4-dimethylpentanoic acid
  VARIANT 4: note = 2-amino-2-(pent-4-en-1-yl)hept-6-enoic acid, useful for stapling/stapled with another amino acid residue comprising an olefin group to form a staple through one of the two olefin groups and/or with another amino acid residue comprising an olefin group to form a staple through the other of the two olefin groups
  SITE 6: note (S)-2-amino-3-((carboxymethyl)(2,2,2-trifluoroethyl)amino) propanoic acid
  SITE 10: note = L-lysine, useful for stapling/stapled with another amino acid residue comprising a side chain acid group to form a staple through the 6-amino group
  SITE 11: note (S)-3-amino-1-((pent-4-en-1-yloxy)carbonyl)pyrrolidine-3-ca rboxylic acid, useful for stapling/stapled with another amino acid residue comprising an olefin group to form a staple through the olefin group
  SITE 13: note = (S)-2-amino-3-(benzo[b]thiophen-3-yl)propanoic acid
  SITE 14: note = L-glutamic acid, useful for stapling/stapled with another amino acid residue comprising a side chain amino group to form a staple through the 4-carboxyl group
  SITE 15: note = C-term amino
XDXXDXAAFKXFXEA

SEQ ID NO: 644 - protein, 16 aa, synthetic construct
  SITE 1: note = N-term Acetic Acid
  SITE 1: note = (R)-2-allylpyrrolidine-2-carboxylic acid, useful for stapling/stapled with another amino acid residue comprising an olefin group to form a staple through the olefin group
  SITE 3: note = (S)-2-amino-4,4-dimethylpentanoic acid
  VARIANT 4: note = 2-amino-2-(pent-4-en-1-yl)hept-6-enoic acid, useful for stapling/stapled with another amino acid residue comprising an olefin group to form a staple through one of the two olefin groups and/or with another amino acid residue comprising an olefin group to form a staple through the other of the two olefin groups
  SITE 6: note (S)-2-amino-3-((carboxymethyl)(2,2,2-trifluoroethyl)amino) propanoic acid
  SITE 10: note = L-lysine, useful for stapling/stapled with another amino acid residue comprising a side chain acid group to form a staple through the 6-amino group
  SITE 11: note (S)-3-amino-1-((pent-4-en-1-yloxy)carbonyl)pyrrolidine-3-ca rboxylic acid, useful for stapling/stapled with another amino acid residue comprising an olefin group to form a staple through the olefin group
  SITE 13: note = (S)-2-amino-3-(benzo[b]thiophen-3-yl)propanoic acid
  SITE 14: note = L-glutamic acid, useful for stapling/stapled with another amino acid residue comprising a side chain amino group to form a staple through the 4-carboxyl group
  SITE 16: note = C-term amino
XDXXDXAAFKXFXELS

SEQ ID NO: 645 - protein, 14 aa, synthetic construct
  SITE 1: note = N-term Acetic Acid
  SITE 1: note = (R)-2-allylpyrrolidine-2-carboxylic acid, useful for stapling/stapled with another amino acid residue comprising an olefin group to form a staple through the olefin group
  SITE 3: note = (S)-2-amino-4,4-dimethylpentanoic acid
  VARIANT 4: note = 2-amino-2-(pent-4-en-1-yl)hept-6-enoic acid, useful for stapling/stapled with another amino acid residue comprising an olefin group to form a staple through one of the two olefin groups and/or with another amino acid residue comprising an olefin group to form a staple through the other of the two olefin groups
  SITE 6: note (S)-2-amino-3-((carboxymethyl)(2,2,2-trifluoroethyl)amino) propanoic acid
  SITE 10: note = L-lysine, useful for stapling/stapled with another amino acid residue comprising a side chain acid group to form a staple through the 6-amino group
  SITE 11: note (S)-3-amino-1-((pent-4-en-1-yloxy)carbonyl)pyrrolidine-3-ca rboxylic acid, useful for stapling/stapled with another amino acid residue comprising an olefin group to form a staple through the olefin group
  SITE 13: note = (S)-2-amino-3-(benzo[b]thiophen-3-yl)propanoic acid
  SITE 14: note = L-glutamic acid, useful for stapling/stapled with another amino acid residue comprising a side chain amino group to form a staple through the 4-carboxyl group
  SITE 14: note = C-term amino
XDXXDXFAFKXFXE

SEQ ID NO: 646 - protein, 15 aa, synthetic construct
  SITE 1: note = N-term Acetic Acid
  SITE 1: note = (R)-2-allylpyrrolidine-2-carboxylic acid, useful for stapling/stapled with another amino acid residue comprising an olefin group to form a staple through the olefin group
  SITE 3: note = (S)-2-amino-4,4-dimethylpentanoic acid
  VARIANT 4: note = 2-amino-2-(pent-4-en-1-yl)hept-6-enoic acid, useful for stapling/stapled with another amino acid residue comprising an olefin group to form a staple through one of the two olefin groups and/or with another amino acid residue comprising an olefin group to form a staple through the other of the two olefin groups
  SITE 6: note (S)-2-amino-3-((carboxymethyl)(2,2,2-trifluoroethyl)amino) propanoic acid
  SITE 10: note = L-lysine, useful for stapling/stapled with another amino acid residue comprising a side chain acid group to form a staple through the 6-amino group
  SITE 11: note (S)-3-amino-1-((pent-4-en-1-yloxy)carbonyl)pyrrolidine-3-ca rboxylic acid, useful for stapling/stapled with another amino acid residue comprising an olefin group to form a staple through the olefin group
  SITE 13: note = (S)-2-amino-3-(benzo[b]thiophen-3-yl)propanoic acid
  SITE 14: note = L-glutamic acid, useful for stapling/stapled with another amino acid residue comprising a side chain amino group to form a staple through the 4-carboxyl group
  SITE 15: note = C-term amino
XDXXDXFAFKXFXEA

SEQ ID NO: 647 - protein, 16 aa, synthetic construct
  SITE 1: note = N-term Acetic Acid
  SITE 1: note = (R)-2-allylpyrrolidine-2-carboxylic acid, useful for stapling/stapled with another amino acid residue comprising an olefin group to form a staple through the olefin group
  SITE 3: note = (S)-2-amino-4,4-dimethylpentanoic acid
  VARIANT 4: note = 2-amino-2-(pent-4-en-1-yl)hept-6-enoic acid, useful for stapling/stapled with another amino acid residue comprising an olefin group to form a staple through one of the two olefin groups and/or with another amino acid residue comprising an olefin group to form a staple through the other of the two olefin groups
  SITE 6: note (S)-2-amino-3-((carboxymethyl)(2,2,2-trifluoroethyl)amino) propanoic acid
  SITE 10: note = L-lysine, useful for stapling/stapled with another amino acid residue comprising a side chain acid group to form a staple through the 6-amino group
  SITE 11: note (S)-3-amino-1-((pent-4-en-1-yloxy)carbonyl)pyrrolidine-3-ca rboxylic acid, useful for stapling/stapled with another amino acid residue comprising an olefin group to form a staple through the olefin group
  SITE 13: note = (S)-2-amino-3-(benzo[b]thiophen-3-yl)propanoic acid
  SITE 14: note = L-glutamic acid, useful for stapling/stapled with another amino acid residue comprising a side chain amino group to form a staple through the 4-carboxyl group
  SITE 16: note = C-term amino
XDXXDXFAFKXFXELS

SEQ ID NO: 648 - protein, 15 aa, synthetic construct
  SITE 1: note = N-term tetrazolo[1,5-a]pyridine-5-carboxylic acid
  SITE 1: note = (R)-2-allylpyrrolidine-2-carboxylic acid, useful for stapling/stapled with another amino acid residue comprising an olefin group to form a staple through the olefin group
  SITE 3: note = (S)-2-amino-4,4-dimethylpentanoic acid
  VARIANT 4: note = 2-amino-2-(pent-4-en-1-yl)hept-6-enoic acid, useful for stapling/stapled with another amino acid residue comprising an olefin group to form a staple through one of the two olefin groups and/or with another amino acid residue comprising an olefin group to form a staple through the other of the two olefin groups
  SITE 6: note = (S)-3-(2-amino-2-carboxyethyl)benzoic acid
  SITE 7: note = 2-amino-2-methylpropanoic acid
  SITE 10: note = L-lysine, useful for stapling/stapled with another amino acid residue comprising a side chain acid group to form a staple through the 6-amino group
  SITE 11: note (S)-3-amino-1-((pent-4-en-1-yloxy)carbonyl)pyrrolidine-3-ca rboxylic acid, useful for stapling/stapled with another amino acid residue comprising an olefin group to form a staple through the olefin group
  SITE 12: note = (S)-2-amino-3-(thiophen-3-yl)propanoic acid
  SITE 13: note = (S)-2-amino-3-(benzo[b]thiophen-3-yl)propanoic acid
  SITE 14: note = L-glutamic acid, useful for stapling/stapled with another amino acid residue comprising a side chain amino group to form a staple through the 4-carboxyl group
  SITE 15: note = C-term amino
XDXXDXXAFKXXXEA

SEQ ID NO: 649 - protein, 15 aa, synthetic construct
  SITE 1: note = N-term pyrazolo[1,5-a]pyrimidine-3-carboxylic acid
  SITE 1: note = (R)-2-allylpyrrolidine-2-carboxylic acid, useful for stapling/stapled with another amino acid residue comprising an olefin group to form a staple through the olefin group
  SITE 3: note = (S)-2-amino-4,4-dimethylpentanoic acid
  VARIANT 4: note = 2-amino-2-(pent-4-en-1-yl)hept-6-enoic acid, useful for stapling/stapled with another amino acid residue comprising an olefin group to form a staple through one of the two olefin groups and/or with another amino acid residue comprising an olefin group to form a staple through the other of the two olefin groups
  SITE 6: note = (S)-3-(2-amino-2-carboxyethyl)benzoic acid
  SITE 7: note = 2-amino-2-methylpropanoic acid
  SITE 10: note = L-lysine, useful for stapling/stapled with another amino acid residue comprising a side chain acid group to form a staple through the 6-amino group
  SITE 11: note (S)-3-amino-1-((pent-4-en-1-yloxy)carbonyl)pyrrolidine-3-ca rboxylic acid, useful for stapling/stapled with another amino acid residue comprising an olefin group to form a staple through the olefin group
  SITE 12: note = (S)-2-amino-3-(thiophen-3-yl)propanoic acid
  SITE 13: note = (S)-2-amino-3-(benzo[b]thiophen-3-yl)propanoic acid
  SITE 14: note = L-glutamic acid, useful for stapling/stapled with another amino acid residue comprising a side chain amino group to form a staple through the 4-carboxyl group
  SITE 15: note = C-term amino
XDXXDXXAFKXXXEA

SEQ ID NO: 650 - protein, 15 aa, synthetic construct
  SITE 1: note = N-term imidazo[1,2-a]pyridine-8-carboxylic acid
  SITE 1: note = (R)-2-allylpyrrolidine-2-carboxylic acid, useful for stapling/stapled with another amino acid residue comprising an olefin group to form a staple through the olefin group
  SITE 3: note = (S)-2-amino-4,4-dimethylpentanoic acid
  VARIANT 4: note = 2-amino-2-(pent-4-en-1-yl)hept-6-enoic acid, useful for stapling/stapled with another amino acid residue comprising an olefin group to form a staple through one of the two olefin groups and/or with another amino acid residue comprising an olefin group to form a staple through the other of the two olefin groups
  SITE 6: note = (S)-3-(2-amino-2-carboxyethyl)benzoic acid
  SITE 7: note = 2-amino-2-methylpropanoic acid
  SITE 10: note = L-lysine, useful for stapling/stapled with another amino acid residue comprising a side chain acid group to form a staple through the 6-amino group
  SITE 11: note (S)-3-amino-1-((pent-4-en-1-yloxy)carbonyl)pyrrolidine-3-ca rboxylic acid, useful for stapling/stapled with another amino acid residue comprising an olefin group to form a staple through the olefin group
  SITE 12: note = (S)-2-amino-3-(thiophen-3-yl)propanoic acid
  SITE 13: note = (S)-2-amino-3-(benzo[b]thiophen-3-yl)propanoic acid
  SITE 14: note = L-glutamic acid, useful for stapling/stapled with another amino acid residue comprising a side chain amino group to form a staple through the 4-carboxyl group
  SITE 15: note = C-term amino
XDXXDXXAFKXXXEA

SEQ ID NO: 651 - protein, 15 aa, synthetic construct
  SITE 1: note = N-term pyridazine-3-carboxylic acid
  SITE 1: note = (R)-2-allylpyrrolidine-2-carboxylic acid, useful for stapling/stapled with another amino acid residue comprising an olefin group to form a staple through the olefin group
  SITE 3: note = (S)-2-amino-4,4-dimethylpentanoic acid
  VARIANT 4: note = 2-amino-2-(pent-4-en-1-yl)hept-6-enoic acid, useful for stapling/stapled with another amino acid residue comprising an olefin group to form a staple through one of the two olefin groups and/or with another amino acid residue comprising an olefin group to form a staple through the other of the two olefin groups
  SITE 6: note = (S)-3-(2-amino-2-carboxyethyl)benzoic acid
  SITE 7: note = 2-amino-2-methylpropanoic acid
  SITE 10: note = L-lysine, useful for stapling/stapled with another amino acid residue comprising a side chain acid group to form a staple through the 6-amino group
  SITE 11: note (S)-3-amino-1-((pent-4-en-1-yloxy)carbonyl)pyrrolidine-3-ca rboxylic acid, useful for stapling/stapled with another amino acid residue comprising an olefin group to form a staple through the olefin group
  SITE 12: note = (S)-2-amino-3-(thiophen-3-yl)propanoic acid
  SITE 13: note = (S)-2-amino-3-(benzo[b]thiophen-3-yl)propanoic acid
  SITE 14: note = L-glutamic acid, useful for stapling/stapled with another amino acid residue comprising a side chain amino group to form a staple through the 4-carboxyl group
  SITE 15: note = C-term amino
XDXXDXXAFKXXXEA

SEQ ID NO: 652 - protein, 15 aa, synthetic construct
  SITE 1: note = N-term 4-(pyridin-2-yl)butanoic acid
  SITE 1: note = (R)-2-allylpyrrolidine-2-carboxylic acid, useful for stapling/stapled with another amino acid residue comprising an olefin group to form a staple through the olefin group
  SITE 3: note = (S)-2-amino-4,4-dimethylpentanoic acid
  VARIANT 4: note = 2-amino-2-(pent-4-en-1-yl)hept-6-enoic acid, useful for stapling/stapled with another amino acid residue comprising an olefin group to form a staple through one of the two olefin groups and/or with another amino acid residue comprising an olefin group to form a staple through the other of the two olefin groups
  SITE 6: note = (S)-3-(2-amino-2-carboxyethyl)benzoic acid
  SITE 7: note = 2-amino-2-methylpropanoic acid
  SITE 10: note = L-lysine, useful for stapling/stapled with another amino acid residue comprising a side chain acid group to form a staple through the 6-amino group
  SITE 11: note (S)-3-amino-1-((pent-4-en-1-yloxy)carbonyl)pyrrolidine-3-ca rboxylic acid, useful for stapling/stapled with another amino acid residue comprising an olefin group to form a staple through the olefin group
  SITE 12: note = (S)-2-amino-3-(thiophen-3-yl)propanoic acid
  SITE 13: note = (S)-2-amino-3-(benzo[b]thiophen-3-yl)propanoic acid
  SITE 14: note = L-glutamic acid, useful for stapling/stapled with another amino acid residue comprising a side chain amino group to form a staple through the 4-carboxyl group
  SITE 15: note = C-term amino
XDXXDXXAFKXXXEA

SEQ ID NO: 653 - protein, 15 aa, synthetic construct
  SITE 1: note = N-term pyrimidine-2-carboxylic acid
  SITE 1: note = (R)-2-allylpyrrolidine-2-carboxylic acid, useful for stapling/stapled with another amino acid residue comprising an olefin group to form a staple through the olefin group
  SITE 3: note = (S)-2-amino-4,4-dimethylpentanoic acid
  VARIANT 4: note = 2-amino-2-(pent-4-en-1-yl)hept-6-enoic acid, useful for stapling/stapled with another amino acid residue comprising an olefin group to form a staple through one of the two olefin groups and/or with another amino acid residue comprising an olefin group to form a staple through the other of the two olefin groups
  SITE 6: note = (S)-3-(2-amino-2-carboxyethyl)benzoic acid
  SITE 7: note = 2-amino-2-methylpropanoic acid
  SITE 10: note = L-lysine, useful for stapling/stapled with another amino acid residue comprising a side chain acid group to form a staple through the 6-amino group
  SITE 11: note (S)-3-amino-1-((pent-4-en-1-yloxy)carbonyl)pyrrolidine-3-ca rboxylic acid, useful for stapling/stapled with another amino acid residue comprising an olefin group to form a staple through the olefin group
  SITE 12: note = (S)-2-amino-3-(thiophen-3-yl)propanoic acid
  SITE 13: note = (S)-2-amino-3-(benzo[b]thiophen-3-yl)propanoic acid
  SITE 14: note = L-glutamic acid, useful for stapling/stapled with another amino acid residue comprising a side chain amino group to form a staple through the 4-carboxyl group
  SITE 15: note = C-term amino
XDXXDXXAFKXXXEA

SEQ ID NO: 654 - protein, 15 aa, synthetic construct
  SITE 1: note = N-term pyrimidine-5-carboxylic acid
  SITE 1: note = (R)-2-allylpyrrolidine-2-carboxylic acid, useful for stapling/stapled with another amino acid residue comprising an olefin group to form a staple through the olefin group
  SITE 3: note = (S)-2-amino-4,4-dimethylpentanoic acid
  VARIANT 4: note = 2-amino-2-(pent-4-en-1-yl)hept-6-enoic acid, useful for stapling/stapled with another amino acid residue comprising an olefin group to form a staple through one of the two olefin groups and/or with another amino acid residue comprising an olefin group to form a staple through the other of the two olefin groups
  SITE 6: note = (S)-3-(2-amino-2-carboxyethyl)benzoic acid
  SITE 7: note = 2-amino-2-methylpropanoic acid
  SITE 10: note = L-lysine, useful for stapling/stapled with another amino acid residue comprising a side chain acid group to form a staple through the 6-amino group
  SITE 11: note (S)-3-amino-1-((pent-4-en-1-yloxy)carbonyl)pyrrolidine-3-ca rboxylic acid, useful for stapling/stapled with another amino acid residue comprising an olefin group to form a staple through the olefin group
  SITE 12: note = (S)-2-amino-3-(thiophen-3-yl)propanoic acid
  SITE 13: note = (S)-2-amino-3-(benzo[b]thiophen-3-yl)propanoic acid
  SITE 14: note = L-glutamic acid, useful for stapling/stapled with another amino acid residue comprising a side chain amino group to form a staple through the 4-carboxyl group
  SITE 15: note = C-term amino
XDXXDXXAFKXXXEA

SEQ ID NO: 655 - protein, 15 aa, synthetic construct
  SITE 1: note = N-term pyrimidine-4-carboxylic acid
  SITE 1: note = (R)-2-allylpyrrolidine-2-carboxylic acid, useful for stapling/stapled with another amino acid residue comprising an olefin group to form a staple through the olefin group
  SITE 3: note = (S)-2-amino-4,4-dimethylpentanoic acid
  VARIANT 4: note = 2-amino-2-(pent-4-en-1-yl)hept-6-enoic acid, useful for stapling/stapled with another amino acid residue comprising an olefin group to form a staple through one of the two olefin groups and/or with another amino acid residue comprising an olefin group to form a staple through the other of the two olefin groups
  SITE 6: note = (S)-3-(2-amino-2-carboxyethyl)benzoic acid
  SITE 7: note = 2-amino-2-methylpropanoic acid
  SITE 10: note = L-lysine, useful for stapling/stapled with another amino acid residue comprising a side chain acid group to form a staple through the 6-amino group
  SITE 11: note (S)-3-amino-1-((pent-4-en-1-yloxy)carbonyl)pyrrolidine-3-ca rboxylic acid, useful for stapling/stapled with another amino acid residue comprising an olefin group to form a staple through the olefin group
  SITE 12: note = (S)-2-amino-3-(thiophen-3-yl)propanoic acid
  SITE 13: note = (S)-2-amino-3-(benzo[b]thiophen-3-yl)propanoic acid
  SITE 14: note = L-glutamic acid, useful for stapling/stapled with another amino acid residue comprising a side chain amino group to form a staple through the 4-carboxyl group
  SITE 15: note = C-term amino
XDXXDXXAFKXXXEA

SEQ ID NO: 656 - protein, 15 aa, synthetic construct
  SITE 1: note = N-term Acetic Acid
  SITE 1: note = (R)-2-allylpyrrolidine-2-carboxylic acid, useful for stapling/stapled with another amino acid residue comprising an olefin group to form a staple through the olefin group
  SITE 3: note = (S)-2-amino-4,4-dimethylpentanoic acid
  VARIANT 4: note = 2-amino-2-(pent-4-en-1-yl)hept-6-enoic acid, useful for stapling/stapled with another amino acid residue comprising an olefin group to form a staple through one of the two olefin groups and/or with another amino acid residue comprising an olefin group to form a staple through the other of the two olefin groups
  SITE 6: note = (S)-3-(2-amino-2-carboxyethyl)benzoic acid
  SITE 7: note = 2-amino-2-methylpropanoic acid
  SITE 10: note = L-lysine, useful for stapling/stapled with another amino acid residue comprising a side chain acid group to form a staple through the 6-amino group
  SITE 11: note (S)-3-amino-1-((pent-4-en-1-yloxy)carbonyl)pyrrolidine-3-ca rboxylic acid, useful for stapling/stapled with another amino acid residue comprising an olefin group to form a staple through the olefin group
  SITE 12: note = (S)-2-amino-3-(thiophen-2-yl)propanoic acid
  SITE 13: note = (S)-2-amino-3-(3,4-dichlorophenyl)propanoic acid
  SITE 14: note = L-glutamic acid, useful for stapling/stapled with another amino acid residue comprising a side chain amino group to form a staple through the 4-carboxyl group
  SITE 15: note = C-term amino
XDXXDXXAFKXXXEA

SEQ ID NO: 657 - protein, 16 aa, synthetic construct
  SITE 1: note = N-term Acetic Acid
  SITE 1: note = (R)-2-allylpyrrolidine-2-carboxylic acid, useful for stapling/stapled with another amino acid residue comprising an olefin group to form a staple through the olefin group
  SITE 3: note = (S)-2-amino-4,4-dimethylpentanoic acid
  VARIANT 4: note = 2-amino-2-(pent-4-en-1-yl)hept-6-enoic acid, useful for stapling/stapled with another amino acid residue comprising an olefin group to form a staple through one of the two olefin groups and/or with another amino acid residue comprising an olefin group to form a staple through the other of the two olefin groups
  SITE 6: note = (S)-3-(2-amino-2-carboxyethyl)benzoic acid
  SITE 7: note = 2-amino-2-methylpropanoic acid
  SITE 10: note = L-lysine, useful for stapling/stapled with another amino acid residue comprising a side chain acid group to form a staple through the 6-amino group
  SITE 11: note (S)-3-amino-1-((pent-4-en-1-yloxy)carbonyl)pyrrolidine-3-ca rboxylic acid, useful for stapling/stapled with another amino acid residue comprising an olefin group to form a staple through the olefin group
  SITE 12: note = (S)-2-amino-3-(thiophen-2-yl)propanoic acid
  SITE 13: note = (S)-2-amino-3-(3,4-dichlorophenyl)propanoic acid
  SITE 14: note = L-glutamic acid, useful for stapling/stapled with another amino acid residue comprising a side chain amino group to form a staple through the 4-carboxyl group
  SITE 16: note = C-term amino
XDXXDXXAFKXXXELS

SEQ ID NO: 658 - protein, 15 aa, synthetic construct
  SITE 1: note = N-term Acetic Acid
  SITE 1: note = (R)-2-allylpyrrolidine-2-carboxylic acid, useful for stapling/stapled with another amino acid residue comprising an olefin group to form a staple through the olefin group
  SITE 3: note = (S)-2-amino-4,4-dimethylpentanoic acid
  VARIANT 4: note = 2-amino-2-(pent-4-en-1-yl)hept-6-enoic acid, useful for stapling/stapled with another amino acid residue comprising an olefin group to form a staple through one of the two olefin groups and/or with another amino acid residue comprising an olefin group to form a staple through the other of the two olefin groups
  SITE 6: note = (S)-3-(2-amino-2-carboxyethyl)benzoic acid
  SITE 10: note = L-lysine, useful for stapling/stapled with another amino acid residue comprising a side chain acid group to form a staple through the 6-amino group
  SITE 11: note (S)-3-amino-1-((pent-4-en-1-yloxy)carbonyl)pyrrolidine-3-ca rboxylic acid, useful for stapling/stapled with another amino acid residue comprising an olefin group to form a staple through the olefin group
  SITE 12: note = (S)-2-amino-3-(thiophen-2-yl)propanoic acid
  SITE 13: note = (S)-2-amino-3-(3,4-dichlorophenyl)propanoic acid
  SITE 14: note = L-glutamic acid, useful for stapling/stapled with another amino acid residue comprising a side chain amino group to form a staple through the 4-carboxyl group
  SITE 15: note = C-term amino
XDXXDXLAFKXXXEA

SEQ ID NO: 659 - protein, 15 aa, synthetic construct
  SITE 1: note = N-term Acetic Acid
  SITE 1: note = (R)-2-allylpyrrolidine-2-carboxylic acid, useful for stapling/stapled with another amino acid residue comprising an olefin group to form a staple through the olefin group
  SITE 3: note = (S)-2-amino-4,4-dimethylpentanoic acid
  VARIANT 4: note = 2-amino-2-(pent-4-en-1-yl)hept-6-enoic acid, useful for stapling/stapled with another amino acid residue comprising an olefin group to form a staple through one of the two olefin groups and/or with another amino acid residue comprising an olefin group to form a staple through the other of the two olefin groups
  SITE 6: note = (S)-3-(2-amino-2-carboxyethyl)benzoic acid
  SITE 10: note = L-lysine, useful for stapling/stapled with another amino acid residue comprising a side chain acid group to form a staple through the 6-amino group
  SITE 11: note (S)-3-amino-1-((pent-4-en-1-yloxy)carbonyl)pyrrolidine-3-ca rboxylic acid, useful for stapling/stapled with another amino acid residue comprising an olefin group to form a staple through the olefin group
  SITE 12: note = (S)-2-amino-3-(thiophen-2-yl)propanoic acid
  SITE 13: note = (S)-2-amino-3-(3,4-dichlorophenyl)propanoic acid
  SITE 14: note = L-glutamic acid, useful for stapling/stapled with another amino acid residue comprising a side chain amino group to form a staple through the 4-carboxyl group
  SITE 15: note = C-term amino
XDXXDXFAFKXXXEA

SEQ ID NO: 660 - protein, 15 aa, synthetic construct
  SITE 1: note = N-term Acetic Acid
  SITE 1: note = (R)-2-allylpyrrolidine-2-carboxylic acid, useful for stapling/stapled with another amino acid residue comprising an olefin group to form a staple through the olefin group
  SITE 3: note = (S)-2-amino-4,4-dimethylpentanoic acid
  VARIANT 4: note = 2-amino-2-(pent-4-en-1-yl)hept-6-enoic acid, useful for stapling/stapled with another amino acid residue comprising an olefin group to form a staple through one of the two olefin groups and/or with another amino acid residue comprising an olefin group to form a staple through the other of the two olefin groups
  SITE 6: note = (S)-3-(2-amino-2-carboxyethyl)benzoic acid
  SITE 7: note = 2-amino-2-methylpropanoic acid
  SITE 9: note = (S)-2-amino-3-(thiophen-2-yl)propanoic acid
  SITE 10: note = L-lysine, useful for stapling/stapled with another amino acid residue comprising a side chain acid group to form a staple through the 6-amino group
  SITE 11: note (S)-3-amino-1-((pent-4-en-1-yloxy)carbonyl)pyrrolidine-3-ca rboxylic acid, useful for stapling/stapled with another amino acid residue comprising an olefin group to form a staple through the olefin group
  SITE 12: note = (S)-2-amino-3-(thiophen-2-yl)propanoic acid
  SITE 13: note = (S)-2-amino-3-(3,4-dichlorophenyl)propanoic acid
  SITE 14: note = L-glutamic acid, useful for stapling/stapled with another amino acid residue comprising a side chain amino group to form a staple through the 4-carboxyl group
  SITE 15: note = C-term amino
XDXXDXXAXKXXXEA

SEQ ID NO: 661 - protein, 14 aa, synthetic construct
  SITE 1: note = N-term Acetic Acid
  SITE 1: note = (R)-2-allylpyrrolidine-2-carboxylic acid, useful for stapling/stapled with another amino acid residue comprising an olefin group to form a staple through the olefin group
  SITE 3: note = (S)-2-amino-4,4-dimethylpentanoic acid
  VARIANT 4: note = 2-amino-2-(pent-4-en-1-yl)hept-6-enoic acid, useful for stapling/stapled with another amino acid residue comprising an olefin group to form a staple through one of the two olefin groups and/or with another amino acid residue comprising an olefin group to form a staple through the other of the two olefin groups
  SITE 6: note = (S)-3-(2-amino-2-carboxyethyl)benzoic acid
  SITE 7: note = 2-amino-2-methylpropanoic acid
  SITE 10: note = L-lysine, useful for stapling/stapled with another amino acid residue comprising a side chain acid group to form a staple through the 6-amino group
  SITE 11: note (S)-3-amino-1-((pent-4-en-1-yloxy)carbonyl)pyrrolidine-3-ca rboxylic acid, useful for stapling/stapled with another amino acid residue comprising an olefin group to form a staple through the olefin group
  SITE 12: note = (S)-2-amino-3-(thiophen-2-yl)propanoic acid
  SITE 13: note = (S)-2-amino-3-(benzo[b]thiophen-3-yl)propanoic acid
  SITE 14: note = L-glutamic acid, useful for stapling/stapled with another amino acid residue comprising a side chain amino group to form a staple through the 4-carboxyl group
  SITE 14: note = C-term amino
XDXXDXXAFKXXXE

SEQ ID NO: 662 - protein, 16 aa, synthetic construct
  SITE 1: note = N-term Acetic Acid
  SITE 1: note = (R)-2-allylpyrrolidine-2-carboxylic acid, useful for stapling/stapled with another amino acid residue comprising an olefin group to form a staple through the olefin group
  SITE 3: note = (S)-2-amino-4,4-dimethylpentanoic acid
  VARIANT 4: note = 2-amino-2-(pent-4-en-1-yl)hept-6-enoic acid, useful for stapling/stapled with another amino acid residue comprising an olefin group to form a staple through one of the two olefin groups and/or with another amino acid residue comprising an olefin group to form a staple through the other of the two olefin groups
  SITE 6: note = (S)-3-(2-amino-2-carboxyethyl)benzoic acid
  SITE 7: note = 2-amino-2-methylpropanoic acid
  SITE 10: note = L-lysine, useful for stapling/stapled with another amino acid residue comprising a side chain acid group to form a staple through the 6-amino group
  SITE 11: note (S)-3-amino-1-((pent-4-en-1-yloxy)carbonyl)pyrrolidine-3-ca rboxylic acid, useful for stapling/stapled with another amino acid residue comprising an olefin group to form a staple through the olefin group
  SITE 12: note = (S)-2-amino-3-(thiophen-2-yl)propanoic acid
  SITE 13: note = (S)-2-amino-3-(benzo[b]thiophen-3-yl)propanoic acid
  SITE 14: note = L-glutamic acid, useful for stapling/stapled with another amino acid residue comprising a side chain amino group to form a staple through the 4-carboxyl group
  SITE 16: note = C-term amino
XDXXDXXAFKXXXELS

SEQ ID NO: 663 - protein, 15 aa, synthetic construct
  SITE 1: note = N-term Acetic Acid
  SITE 1: note = (R)-2-allylpyrrolidine-2-carboxylic acid, useful for stapling/stapled with another amino acid residue comprising an olefin group to form a staple through the olefin group
  SITE 3: note = (S)-2-amino-4,4-dimethylpentanoic acid
  VARIANT 4: note = 2-amino-2-(pent-4-en-1-yl)hept-6-enoic acid, useful for stapling/stapled with another amino acid residue comprising an olefin group to form a staple through one of the two olefin groups and/or with another amino acid residue comprising an olefin group to form a staple through the other of the two olefin groups
  SITE 6: note = (S)-3-(2-amino-2-carboxyethyl)benzoic acid
  SITE 10: note = L-lysine, useful for stapling/stapled with another amino acid residue comprising a side chain acid group to form a staple through the 6-amino group
  SITE 11: note (S)-3-amino-1-((pent-4-en-1-yloxy)carbonyl)pyrrolidine-3-ca rboxylic acid, useful for stapling/stapled with another amino acid residue comprising an olefin group to form a staple through the olefin group
  SITE 12: note = (S)-2-amino-3-(thiophen-2-yl)propanoic acid
  SITE 13: note = (S)-2-amino-3-(benzo[b]thiophen-3-yl)propanoic acid
  SITE 14: note = L-glutamic acid, useful for stapling/stapled with another amino acid residue comprising a side chain amino group to form a staple through the 4-carboxyl group
  SITE 15: note = C-term amino
XDXXDXLAFKXXXEA

SEQ ID NO: 664 - protein, 15 aa, synthetic construct
  SITE 1: note = N-term Acetic Acid
  SITE 1: note = (R)-2-allylpyrrolidine-2-carboxylic acid, useful for stapling/stapled with another amino acid residue comprising an olefin group to form a staple through the olefin group
  SITE 3: note = (S)-2-amino-4,4-dimethylpentanoic acid
  VARIANT 4: note = 2-amino-2-(pent-4-en-1-yl)hept-6-enoic acid, useful for stapling/stapled with another amino acid residue comprising an olefin group to form a staple through one of the two olefin groups and/or with another amino acid residue comprising an olefin group to form a staple through the other of the two olefin groups
  SITE 6: note = (S)-3-(2-amino-2-carboxyethyl)benzoic acid
  SITE 10: note = L-lysine, useful for stapling/stapled with another amino acid residue comprising a side chain acid group to form a staple through the 6-amino group
  SITE 11: note (S)-3-amino-1-((pent-4-en-1-yloxy)carbonyl)pyrrolidine-3-ca rboxylic acid, useful for stapling/stapled with another amino acid residue comprising an olefin group to form a staple through the olefin group
  SITE 12: note = (S)-2-amino-3-(thiophen-2-yl)propanoic acid
  SITE 13: note = (S)-2-amino-3-(benzo[b]thiophen-3-yl)propanoic acid
  SITE 14: note = L-glutamic acid, useful for stapling/stapled with another amino acid residue comprising a side chain amino group to form a staple through the 4-carboxyl group
  SITE 15: note = C-term amino
XDXXDXFAFKXXXEA

SEQ ID NO: 665 - protein, 15 aa, synthetic construct
  SITE 1: note = N-term Acetic Acid
  SITE 1: note = (R)-2-allylpyrrolidine-2-carboxylic acid, useful for stapling/stapled with another amino acid residue comprising an olefin group to form a staple through the olefin group
  SITE 3: note = (S)-2-amino-4,4-dimethylpentanoic acid
  VARIANT 4: note = 2-amino-2-(pent-4-en-1-yl)hept-6-enoic acid, useful for stapling/stapled with another amino acid residue comprising an olefin group to form a staple through one of the two olefin groups and/or with another amino acid residue comprising an olefin group to form a staple through the other of the two olefin groups
  SITE 6: note = (S)-3-(2-amino-2-carboxyethyl)benzoic acid
  SITE 7: note = 2-amino-2-methylpropanoic acid
  SITE 10: note = L-lysine, useful for stapling/stapled with another amino acid residue comprising a side chain acid group to form a staple through the 6-amino group
  SITE 11: note (S)-3-amino-1-((pent-4-en-1-yloxy)carbonyl)pyrrolidine-3-ca rboxylic acid, useful for stapling/stapled with another amino acid residue comprising an olefin group to form a staple through the olefin group
  SITE 12: note = (S)-2-amino-3-(thiophen-3-yl)propanoic acid
  SITE 13: note = (S)-2-amino-3-(benzo[b]thiophen-3-yl)propanoic acid
  SITE 14: note = L-glutamic acid, useful for stapling/stapled with another amino acid residue comprising a side chain amino group to form a staple through the 4-carboxyl group
  SITE 15: note = C-term amino
XFXXDXXAFKXXXEA

SEQ ID NO: 666 - protein, 15 aa, synthetic construct
  SITE 1: note = N-term Acetic Acid
  SITE 1: note = (R)-2-allylpyrrolidine-2-carboxylic acid, useful for stapling/stapled with another amino acid residue comprising an olefin group to form a staple through the olefin group
  SITE 3: note = (S)-2-amino-4,4-dimethylpentanoic acid
  VARIANT 4: note = 2-amino-2-(pent-4-en-1-yl)hept-6-enoic acid, useful for stapling/stapled with another amino acid residue comprising an olefin group to form a staple through one of the two olefin groups and/or with another amino acid residue comprising an olefin group to form a staple through the other of the two olefin groups
  SITE 6: note = (S)-3-(2-amino-2-carboxyethyl)benzoic acid
  SITE 7: note = 2-amino-2-methylpropanoic acid
  SITE 10: note = L-lysine, useful for stapling/stapled with another amino acid residue comprising a side chain acid group to form a staple through the 6-amino group
  SITE 11: note (S)-3-amino-1-((pent-4-en-1-yloxy)carbonyl)pyrrolidine-3-ca rboxylic acid, useful for stapling/stapled with another amino acid residue comprising an olefin group to form a staple through the olefin group
  SITE 12: note = (S)-2-amino-3-(thiophen-3-yl)propanoic acid
  SITE 13: note = (S)-2-amino-3-(benzo[b]thiophen-3-yl)propanoic acid
  SITE 14: note = L-glutamic acid, useful for stapling/stapled with another amino acid residue comprising a side chain amino group to form a staple through the 4-carboxyl group
  SITE 15: note = C-term amino
XQXXDXXAFKXXXEA

SEQ ID NO: 667 - protein, 15 aa, synthetic construct
  SITE 1: note = N-term Acetic Acid
  SITE 1: note = (R)-2-allylpyrrolidine-2-carboxylic acid, useful for stapling/stapled with another amino acid residue comprising an olefin group to form a staple through the olefin group
  SITE 2: note = (S)-2-amino-3-(thiophen-3-yl)propanoic acid
  SITE 3: note = (S)-2-amino-4,4-dimethylpentanoic acid
  VARIANT 4: note = 2-amino-2-(pent-4-en-1-yl)hept-6-enoic acid, useful for stapling/stapled with another amino acid residue comprising an olefin group to form a staple through one of the two olefin groups and/or with another amino acid residue comprising an olefin group to form a staple through the other of the two olefin groups
  SITE 6: note = (S)-3-(2-amino-2-carboxyethyl)benzoic acid
  SITE 7: note = 2-amino-2-methylpropanoic acid
  SITE 10: note = L-lysine, useful for stapling/stapled with another amino acid residue comprising a side chain acid group to form a staple through the 6-amino group
  SITE 11: note (S)-3-amino-1-((pent-4-en-1-yloxy)carbonyl)pyrrolidine-3-ca rboxylic acid, useful for stapling/stapled with another amino acid residue comprising an olefin group to form a staple through the olefin group
  SITE 12: note = (S)-2-amino-3-(thiophen-3-yl)propanoic acid
  SITE 13: note = (S)-2-amino-3-(benzo[b]thiophen-3-yl)propanoic acid
  SITE 14: note = L-glutamic acid, useful for stapling/stapled with another amino acid residue comprising a side chain amino group to form a staple through the 4-carboxyl group
  SITE 15: note = C-term amino
XXXXDXXAFKXXXEA

SEQ ID NO: 668 - protein, 15 aa, synthetic construct
  SITE 1: note = N-term pent-4-enoic acid, useful for stapling/stapled with another amino acid residue comprising an olefin group to form a staple through the olefin group
  SITE 1: note = (S)-2-methylpyrrolidine-2-carboxylic acid
  VARIANT 3: note = 2-amino-2-(pent-4-en-1-yl)hept-6-enoic acid, useful for stapling/stapled with another amino acid residue comprising an olefin group to form a staple through one of the two olefin groups and/or with another amino acid residue comprising an olefin group to form a staple through the other of the two olefin groups
  SITE 6: note = (S)-3-(2-amino-2-carboxyethyl)benzoic acid
  SITE 10: note (S)-3-amino-1-((pent-4-en-1-yloxy)carbonyl)pyrrolidine-3-ca rboxylic acid, useful for stapling/stapled with another amino acid residue comprising an olefin group to form a staple through the olefin group
  SITE 11: note = L-lysine, useful for stapling/stapled with another amino acid residue comprising a side chain acid group to form a staple through the 6-amino group
  SITE 12: note = (S)-2-amino-3-(thiophen-3-yl)propanoic acid
  SITE 13: note = (S)-2-amino-3-(benzo[b]thiophen-3-yl)propanoic acid
  SITE 15: note = L-glutamic acid, useful for stapling/stapled with another amino acid residue comprising a side chain amino group to form a staple through the 4-carboxyl group
  SITE 15: note = C-term amino
XDXADXAAFXKXXAE

SEQ ID NO: 669 - protein, 15 aa, synthetic construct
  SITE 1: note = N-term pent-4-enoic acid, useful for stapling/stapled with another amino acid residue comprising an olefin group to form a staple through the olefin group
  SITE 1: note = (R)-thiazolidine-4-carboxylic acid
  VARIANT 3: note = 2-amino-2-(pent-4-en-1-yl)hept-6-enoic acid, useful for stapling/stapled with another amino acid residue comprising an olefin group to form a staple through one of the two olefin groups and/or with another amino acid residue comprising an olefin group to form a staple through the other of the two olefin groups
  SITE 6: note = (S)-3-(2-amino-2-carboxyethyl)benzoic acid
  SITE 10: note (S)-3-amino-1-((pent-4-en-1-yloxy)carbonyl)pyrrolidine-3-ca rboxylic acid, useful for stapling/stapled with another amino acid residue comprising an olefin group to form a staple through the olefin group
  SITE 11: note = L-lysine, useful for stapling/stapled with another amino acid residue comprising a side chain acid group to form a staple through the 6-amino group
  SITE 12: note = (S)-2-amino-3-(thiophen-3-yl)propanoic acid
  SITE 13: note = (S)-2-amino-3-(benzo[b]thiophen-3-yl)propanoic acid
  SITE 15: note = L-glutamic acid, useful for stapling/stapled with another amino acid residue comprising a side chain amino group to form a staple through the 4-carboxyl group
  SITE 15: note = C-term amino
XDXADXAAFXKXXAE

SEQ ID NO: 670 - protein, 15 aa, synthetic construct
  SITE 1: note = N-term Acetic Acid
  SITE 1: note = (R)-2-allylpyrrolidine-2-carboxylic acid, useful for stapling/stapled with another amino acid residue comprising an olefin group to form a staple through the olefin group
  SITE 2: note = 3-((carboxymethyl)amino)propanoic acid
  SITE 3: note = (S)-2-amino-4,4-dimethylpentanoic acid
  VARIANT 4: note = 2-amino-2-(pent-4-en-1-yl)hept-6-enoic acid, useful for stapling/stapled with another amino acid residue comprising an olefin group to form a staple through one of the two olefin groups and/or with another amino acid residue comprising an olefin group to form a staple through the other of the two olefin groups
  SITE 6: note = (S)-3-(2-amino-2-carboxyethyl)benzoic acid
  SITE 7: note = 2-amino-2-methylpropanoic acid
  SITE 10: note = L-lysine, useful for stapling/stapled with another amino acid residue comprising a side chain acid group to form a staple through the 6-amino group
  SITE 11: note (S)-3-amino-1-((pent-4-en-1-yloxy)carbonyl)pyrrolidine-3-ca rboxylic acid, useful for stapling/stapled with another amino acid residue comprising an olefin group to form a staple through the olefin group
  SITE 12: note = (S)-2-amino-3-(thiophen-3-yl)propanoic acid
  SITE 13: note = (S)-2-amino-3-(benzo[b]thiophen-3-yl)propanoic acid
  SITE 14: note = L-glutamic acid, useful for stapling/stapled with another amino acid residue comprising a side chain amino group to form a staple through the 4-carboxyl group
  SITE 15: note = C-term amino
XXXXDXXAFKXXXEA

SEQ ID NO: 671 - protein, 15 aa, synthetic construct
  SITE 1: note = N-term Acetic Acid
  SITE 1: note = (R)-2-allylpyrrolidine-2-carboxylic acid, useful for stapling/stapled with another amino acid residue comprising an olefin group to form a staple through the olefin group
  SITE 3: note = (S)-2-amino-4,4-dimethylpentanoic acid
  VARIANT 4: note = 2-amino-2-(pent-4-en-1-yl)hept-6-enoic acid, useful for stapling/stapled with another amino acid residue comprising an olefin group to form a staple through one of the two olefin groups and/or with another amino acid residue comprising an olefin group to form a staple through the other of the two olefin groups
  SITE 6: note = (S)-3-(2-amino-2-carboxyethyl)benzoic acid
  SITE 7: note = 2-amino-2-methylpropanoic acid
  SITE 10: note = L-lysine, useful for stapling/stapled with another amino acid residue comprising a side chain acid group to form a staple through the 6-amino group
  SITE 11: note (S)-3-amino-1-((pent-4-en-1-yloxy)carbonyl)pyrrolidine-3-ca rboxylic acid, useful for stapling/stapled with another amino acid residue comprising an olefin group to form a staple through the olefin group
  SITE 12: note = (S)-2-aminooctanoic acid
  SITE 13: note = (S)-2-amino-3-(benzo[b]thiophen-3-yl)propanoic acid
  SITE 14: note = L-glutamic acid, useful for stapling/stapled with another amino acid residue comprising a side chain amino group to form a staple through the 4-carboxyl group
  SITE 15: note = C-term amino
XDXXDXXAFKXXXEA

SEQ ID NO: 672 - protein, 15 aa, synthetic construct
  SITE 1: note = N-term Acetic Acid
  SITE 1: note = (R)-2-allylpyrrolidine-2-carboxylic acid, useful for stapling/stapled with another amino acid residue comprising an olefin group to form a staple through the olefin group
  SITE 3: note = (S)-2-amino-4,4-dimethylpentanoic acid
  VARIANT 4: note = 2-amino-2-(pent-4-en-1-yl)hept-6-enoic acid, useful for stapling/stapled with another amino acid residue comprising an olefin group to form a staple through one of the two olefin groups and/or with another amino acid residue comprising an olefin group to form a staple through the other of the two olefin groups
  SITE 6: note = (S)-3-(2-amino-2-carboxyethyl)benzoic acid
  SITE 7: note = 2-amino-2-methylpropanoic acid
  SITE 10: note = L-lysine, useful for stapling/stapled with another amino acid residue comprising a side chain acid group to form a staple through the 6-amino group
  SITE 11: note (S)-3-amino-1-((pent-4-en-1-yloxy)carbonyl)pyrrolidine-3-ca rboxylic acid, useful for stapling/stapled with another amino acid residue comprising an olefin group to form a staple through the olefin group
  SITE 12: note = (S)-2-aminononanoic acid
  SITE 13: note = (S)-2-amino-3-(benzo[b]thiophen-3-yl)propanoic acid
  SITE 14: note = L-glutamic acid, useful for stapling/stapled with another amino acid residue comprising a side chain amino group to form a staple through the 4-carboxyl group
  SITE 15: note = C-term amino
XDXXDXXAFKXXXEA

SEQ ID NO: 673 - protein, 15 aa, synthetic construct
  SITE 1: note = N-term Acetic Acid
  SITE 1: note = (R)-2-allylpyrrolidine-2-carboxylic acid, useful for stapling/stapled with another amino acid residue comprising an olefin group to form a staple through the olefin group
  SITE 3: note = (S)-2-amino-4,4-dimethylpentanoic acid
  VARIANT 4: note = 2-amino-2-(pent-4-en-1-yl)hept-6-enoic acid, useful for stapling/stapled with another amino acid residue comprising an olefin group to form a staple through one of the two olefin groups and/or with another amino acid residue comprising an olefin group to form a staple through the other of the two olefin groups
  SITE 6: note = (S)-3-(2-amino-2-carboxyethyl)benzoic acid
  SITE 7: note = 2-amino-2-methylpropanoic acid
  SITE 10: note = L-lysine, useful for stapling/stapled with another amino acid residue comprising a side chain acid group to form a staple through the 6-amino group
  SITE 11: note (S)-3-amino-1-((pent-4-en-1-yloxy)carbonyl)pyrrolidine-3-ca rboxylic acid, useful for stapling/stapled with another amino acid residue comprising an olefin group to form a staple through the olefin group
  SITE 12: note = (S)-2-amino-3-(benzo[b]thiophen-3-yl)propanoic acid
  SITE 13: note = (S)-2-amino-3-(benzo[b]thiophen-3-yl)propanoic acid
  SITE 14: note = L-glutamic acid, useful for stapling/stapled with another amino acid residue comprising a side chain amino group to form a staple through the 4-carboxyl group
  SITE 15: note = C-term amino
XDXXDXXAFKXXXEA

SEQ ID NO: 674 - protein, 15 aa, synthetic construct
  SITE 1: note = N-term Acetic Acid
  SITE 1: note = (R)-2-allylpyrrolidine-2-carboxylic acid, useful for stapling/stapled with another amino acid residue comprising an olefin group to form a staple through the olefin group
  SITE 3: note = (S)-2-amino-4,4-dimethylpentanoic acid
  VARIANT 4: note = 2-amino-2-(pent-4-en-1-yl)hept-6-enoic acid, useful for stapling/stapled with another amino acid residue comprising an olefin group to form a staple through one of the two olefin groups and/or with another amino acid residue comprising an olefin group to form a staple through the other of the two olefin groups
  SITE 6: note = (S)-3-(2-amino-2-carboxyethyl)benzoic acid
  SITE 7: note = 2-amino-2-methylpropanoic acid
  SITE 10: note = L-lysine, useful for stapling/stapled with another amino acid residue comprising a side chain acid group to form a staple through the 6-amino group
  SITE 11: note (S)-3-amino-1-((pent-4-en-1-yloxy)carbonyl)pyrrolidine-3-ca rboxylic acid, useful for stapling/stapled with another amino acid residue comprising an olefin group to form a staple through the olefin group
  SITE 12: note = (S)-2-aminooctanoic acid
  SITE 13: note = (S)-2-amino-3-(3,4-dichlorophenyl)propanoic acid
  SITE 14: note = L-glutamic acid, useful for stapling/stapled with another amino acid residue comprising a side chain amino group to form a staple through the 4-carboxyl group
  SITE 15: note = C-term amino
XDXXDXXAFKXXXEA

SEQ ID NO: 675 - protein, 15 aa, synthetic construct
  SITE 1: note = N-term Acetic Acid
  SITE 1: note = (R)-2-allylpyrrolidine-2-carboxylic acid, useful for stapling/stapled with another amino acid residue comprising an olefin group to form a staple through the olefin group
  SITE 3: note = (S)-2-amino-4,4-dimethylpentanoic acid
  VARIANT 4: note = 2-amino-2-(pent-4-en-1-yl)hept-6-enoic acid, useful for stapling/stapled with another amino acid residue comprising an olefin group to form a staple through one of the two olefin groups and/or with another amino acid residue comprising an olefin group to form a staple through the other of the two olefin groups
  SITE 6: note = (S)-3-(2-amino-2-carboxyethyl)benzoic acid
  SITE 7: note = 2-amino-2-methylpropanoic acid
  SITE 10: note = L-lysine, useful for stapling/stapled with another amino acid residue comprising a side chain acid group to form a staple through the 6-amino group
  SITE 11: note (S)-3-amino-1-((pent-4-en-1-yloxy)carbonyl)pyrrolidine-3-ca rboxylic acid, useful for stapling/stapled with another amino acid residue comprising an olefin group to form a staple through the olefin group
  SITE 12: note = (S)-2-aminononanoic acid
  SITE 13: note = (S)-2-amino-3-(3,4-dichlorophenyl)propanoic acid
  SITE 14: note = L-glutamic acid, useful for stapling/stapled with another amino acid residue comprising a side chain amino group to form a staple through the 4-carboxyl group
  SITE 15: note = C-term amino
XDXXDXXAFKXXXEA

SEQ ID NO: 676 - protein, 15 aa, synthetic construct
  SITE 1: note = N-term Acetic Acid
  SITE 1: note = (R)-2-allylpyrrolidine-2-carboxylic acid, useful for stapling/stapled with another amino acid residue comprising an olefin group to form a staple through the olefin group
  SITE 3: note = (S)-2-amino-4,4-dimethylpentanoic acid
  VARIANT 4: note = 2-amino-2-(pent-4-en-1-yl)hept-6-enoic acid, useful for stapling/stapled with another amino acid residue comprising an olefin group to form a staple through one of the two olefin groups and/or with another amino acid residue comprising an olefin group to form a staple through the other of the two olefin groups
  SITE 6: note = (S)-3-(2-amino-2-carboxyethyl)benzoic acid
  SITE 7: note = 2-amino-2-methylpropanoic acid
  SITE 10: note = L-lysine, useful for stapling/stapled with another amino acid residue comprising a side chain acid group to form a staple through the 6-amino group
  SITE 11: note (S)-3-amino-1-((pent-4-en-1-yloxy)carbonyl)pyrrolidine-3-ca rboxylic acid, useful for stapling/stapled with another amino acid residue comprising an olefin group to form a staple through the olefin group
  SITE 12: note = (S)-2-amino-3-(benzo[b]thiophen-3-yl)propanoic acid
  SITE 13: note = (S)-2-amino-3-(3,4-dichlorophenyl)propanoic acid
  SITE 14: note = L-glutamic acid, useful for stapling/stapled with another amino acid residue comprising a side chain amino group to form a staple through the 4-carboxyl group
  SITE 15: note = C-term amino
XDXXDXXAFKXXXEA

SEQ ID NO: 677 - protein, 15 aa, synthetic construct
  SITE 1: note = N-term Acetic Acid
  SITE 1: note = (R)-2-allylpyrrolidine-2-carboxylic acid, useful for stapling/stapled with another amino acid residue comprising an olefin group to form a staple through the olefin group
  SITE 3: note = (S)-2-amino-4,4-dimethylpentanoic acid
  VARIANT 4: note = 2-amino-2-(pent-4-en-1-yl)hept-6-enoic acid, useful for stapling/stapled with another amino acid residue comprising an olefin group to form a staple through one of the two olefin groups and/or with another amino acid residue comprising an olefin group to form a staple through the other of the two olefin groups
  SITE 6: note = (S)-3-(2-amino-2-carboxyethyl)benzoic acid
  SITE 7: note = 2-amino-2-methylpropanoic acid
  SITE 10: note = L-lysine, useful for stapling/stapled with another amino acid residue comprising a side chain acid group to form a staple through the 6-amino group
  SITE 11: note 3-amino-1-((hex-5-en-1-yloxy)carbonyl)azetidine-3-carboxyli c acid, useful for stapling/stapled with another amino acid residue comprising an olefin group to form a staple through the olefin group
  SITE 12: note = (S)-2-amino-3-(2-(trifluoromethyl)phenyl)propanoic acid
  SITE 13: note = (S)-2-amino-3-(benzo[b]thiophen-3-yl)propanoic acid
  SITE 14: note = L-glutamic acid, useful for stapling/stapled with another amino acid residue comprising a side chain amino group to form a staple through the 4-carboxyl group
  SITE 15: note = C-term amino
XDXXDXXAFKXXXEA

SEQ ID NO: 678 - protein, 15 aa, synthetic construct
  SITE 1: note = N-term Acetic Acid
  SITE 1: note = (R)-2-allylpyrrolidine-2-carboxylic acid, useful for stapling/stapled with another amino acid residue comprising an olefin group to form a staple through the olefin group
  SITE 3: note = (S)-2-amino-4,4-dimethylpentanoic acid
  VARIANT 4: note = 2-amino-2-(pent-4-en-1-yl)hept-6-enoic acid, useful for stapling/stapled with another amino acid residue comprising an olefin group to form a staple through one of the two olefin groups and/or with another amino acid residue comprising an olefin group to form a staple through the other of the two olefin groups
  SITE 6: note = (S)-3-(2-amino-2-carboxyethyl)benzoic acid
  SITE 7: note = 2-amino-2-methylpropanoic acid
  SITE 10: note = L-lysine, useful for stapling/stapled with another amino acid residue comprising a side chain acid group to form a staple through the 6-amino group
  SITE 11: note 3-amino-1-((pent-4-en-1-yloxy)carbonyl)azetidine-3-carboxyl ic acid, useful for stapling/stapled with another amino acid residue comprising an olefin group to form a staple through the olefin group
  SITE 12: note = (S)-2-amino-3-(thiophen-3-yl)propanoic acid
  SITE 13: note = (S)-2-amino-3-(benzo[b]thiophen-3-yl)propanoic acid
  SITE 14: note = L-glutamic acid, useful for stapling/stapled with another amino acid residue comprising a side chain amino group to form a staple through the 4-carboxyl group
  SITE 15: note = C-term amino
XDXXDXXAFKXXXEA

SEQ ID NO: 679 - protein, 15 aa, synthetic construct
  SITE 1: note = N-term Acetic Acid
  SITE 1: note = (R)-2-allylpyrrolidine-2-carboxylic acid, useful for stapling/stapled with another amino acid residue comprising an olefin group to form a staple through the olefin group
  SITE 3: note = (S)-2-amino-4,4-dimethylpentanoic acid
  VARIANT 4: note = 2-amino-2-(pent-4-en-1-yl)hept-6-enoic acid, useful for stapling/stapled with another amino acid residue comprising an olefin group to form a staple through one of the two olefin groups and/or with another amino acid residue comprising an olefin group to form a staple through the other of the two olefin groups
  SITE 6: note = (S)-3-(2-amino-2-carboxyethyl)benzoic acid
  SITE 7: note = 2-amino-2-methylpropanoic acid
  SITE 10: note = L-lysine, useful for stapling/stapled with another amino acid residue comprising a side chain acid group to form a staple through the 6-amino group
  SITE 11: note 3-amino-1-((hex-5-en-1-yloxy)carbonyl)azetidine-3-carboxyli c acid, useful for stapling/stapled with another amino acid residue comprising an olefin group to form a staple through the olefin group
  SITE 12: note = (S)-2-amino-3-(thiophen-3-yl)propanoic acid
  SITE 13: note = (S)-2-amino-3-(benzo[b]thiophen-3-yl)propanoic acid
  SITE 14: note = L-glutamic acid, useful for stapling/stapled with another amino acid residue comprising a side chain amino group to form a staple through the 4-carboxyl group
  SITE 15: note = C-term amino
XDXXDXXAFKXXXEA

SEQ ID NO: 680 - protein, 15 aa, synthetic construct
  SITE 1: note = N-term Acetic Acid
  SITE 1: note = (R)-2-allylpyrrolidine-2-carboxylic acid, useful for stapling/stapled with another amino acid residue comprising an olefin group to form a staple through the olefin group
  SITE 3: note = (S)-2-amino-4,4-dimethylpentanoic acid
  VARIANT 4: note = 2-amino-2-(pent-4-en-1-yl)hept-6-enoic acid, useful for stapling/stapled with another amino acid residue comprising an olefin group to form a staple through one of the two olefin groups and/or with another amino acid residue comprising an olefin group to form a staple through the other of the two olefin groups
  SITE 6: note = (S)-3-(2-amino-2-carboxyethyl)benzoic acid
  SITE 7: note = 2-amino-2-methylpropanoic acid
  SITE 10: note = L-lysine, useful for stapling/stapled with another amino acid residue comprising a side chain acid group to form a staple through the 6-amino group
  SITE 11: note (S)-3-amino-1-((pent-4-en-1-yloxy)carbonyl)pyrrolidine-3-ca rboxylic acid, useful for stapling/stapled with another amino acid residue comprising an olefin group to form a staple through the olefin group
  SITE 12: note = (S)-3-([1,1'-biphenyl]-2-yl)-2-aminopropanoic acid
  SITE 13: note = (S)-2-amino-3-(benzo[b]thiophen-3-yl)propanoic acid
  SITE 14: note = L-glutamic acid, useful for stapling/stapled with another amino acid residue comprising a side chain amino group to form a staple through the 4-carboxyl group
  SITE 15: note = C-term amino
XDXXDXXAFKXXXEA

SEQ ID NO: 681 - protein, 15 aa, synthetic construct
  SITE 1: note = N-term Acetic Acid
  SITE 1: note = (R)-2-allylpyrrolidine-2-carboxylic acid, useful for stapling/stapled with another amino acid residue comprising an olefin group to form a staple through the olefin group
  SITE 3: note = (S)-2-amino-4,4-dimethylpentanoic acid
  VARIANT 4: note = 2-amino-2-(pent-4-en-1-yl)hept-6-enoic acid, useful for stapling/stapled with another amino acid residue comprising an olefin group to form a staple through one of the two olefin groups and/or with another amino acid residue comprising an olefin group to form a staple through the other of the two olefin groups
  SITE 6: note = (S)-3-(2-amino-2-carboxyethyl)benzoic acid
  SITE 7: note = 2-amino-2-methylpropanoic acid
  SITE 10: note = L-lysine, useful for stapling/stapled with another amino acid residue comprising a side chain acid group to form a staple through the 6-amino group
  SITE 11: note (S)-3-amino-1-((pent-4-en-1-yloxy)carbonyl)pyrrolidine-3-ca rboxylic acid, useful for stapling/stapled with another amino acid residue comprising an olefin group to form a staple through the olefin group
  SITE 12: note = (S)-3-([1,1'-biphenyl]-2-yl)-2-aminopropanoic acid
  SITE 13: note = (S)-2-amino-3-(3,4-dichlorophenyl)propanoic acid
  SITE 14: note = L-glutamic acid, useful for stapling/stapled with another amino acid residue comprising a side chain amino group to form a staple through the 4-carboxyl group
  SITE 15: note = C-term amino
XDXXDXXAFKXXXEA

SEQ ID NO: 682 - protein, 16 aa, synthetic construct
  SITE 1: note = N-term Acetic Acid
  SITE 1: note = (R)-2-allylpyrrolidine-2-carboxylic acid, useful for stapling/stapled with another amino acid residue comprising an olefin group to form a staple through the olefin group
  SITE 3: note = (S)-2-amino-4,4-dimethylpentanoic acid
  VARIANT 4: note = 2-amino-2-(pent-4-en-1-yl)hept-6-enoic acid, useful for stapling/stapled with another amino acid residue comprising an olefin group to form a staple through one of the two olefin groups and/or with another amino acid residue comprising an olefin group to form a staple through the other of the two olefin groups
  SITE 6: note = (S)-3-(2-amino-2-carboxyethyl)benzoic acid
  SITE 7: note = 2-amino-2-methylpropanoic acid
  SITE 10: note = L-lysine, useful for stapling/stapled with another amino acid residue comprising a side chain acid group to form a staple through the 6-amino group
  SITE 11: note (S)-3-amino-1-((pent-4-en-1-yloxy)carbonyl)pyrrolidine-3-ca rboxylic acid, useful for stapling/stapled with another amino acid residue comprising an olefin group to form a staple through the olefin group
  SITE 12: note = (S)-3-([1,1'-biphenyl]-2-yl)-2-aminopropanoic acid
  SITE 13: note = (S)-2-amino-3-(benzo[b]thiophen-3-yl)propanoic acid
  SITE 14: note = L-glutamic acid, useful for stapling/stapled with another amino acid residue comprising a side chain amino group to form a staple through the 4-carboxyl group
  SITE 16: note = C-term amino
XDXXDXXAFKXXXELS

SEQ ID NO: 683 - protein, 16 aa, synthetic construct
  SITE 1: note = N-term Acetic Acid
  SITE 1: note = (R)-2-allylpyrrolidine-2-carboxylic acid, useful for stapling/stapled with another amino acid residue comprising an olefin group to form a staple through the olefin group
  SITE 3: note = (S)-2-amino-4,4-dimethylpentanoic acid
  VARIANT 4: note = 2-amino-2-(pent-4-en-1-yl)hept-6-enoic acid, useful for stapling/stapled with another amino acid residue comprising an olefin group to form a staple through one of the two olefin groups and/or with another amino acid residue comprising an olefin group to form a staple through the other of the two olefin groups
  SITE 6: note = (S)-3-(2-amino-2-carboxyethyl)benzoic acid
  SITE 7: note = 2-amino-2-methylpropanoic acid
  SITE 10: note = L-lysine, useful for stapling/stapled with another amino acid residue comprising a side chain acid group to form a staple through the 6-amino group
  SITE 11: note (S)-3-amino-1-((pent-4-en-1-yloxy)carbonyl)pyrrolidine-3-ca rboxylic acid, useful for stapling/stapled with another amino acid residue comprising an olefin group to form a staple through the olefin group
  SITE 12: note = (S)-3-([1,1'-biphenyl]-2-yl)-2-aminopropanoic acid
  SITE 13: note = (S)-2-amino-3-(3,4-dichlorophenyl)propanoic acid
  SITE 14: note = L-glutamic acid, useful for stapling/stapled with another amino acid residue comprising a side chain amino group to form a staple through the 4-carboxyl group
  SITE 16: note = C-term amino
XDXXDXXAFKXXXELS

SEQ ID NO: 684 - protein, 16 aa, synthetic construct
  SITE 1: note = N-term Acetic Acid
  SITE 1: note = (R)-2-allylpyrrolidine-2-carboxylic acid, useful for stapling/stapled with another amino acid residue comprising an olefin group to form a staple through the olefin group
  SITE 3: note = (S)-2-amino-4,4-dimethylpentanoic acid
  VARIANT 4: note = 2-amino-2-(pent-4-en-1-yl)hept-6-enoic acid, useful for stapling/stapled with another amino acid residue comprising an olefin group to form a staple through one of the two olefin groups and/or with another amino acid residue comprising an olefin group to form a staple through the other of the two olefin groups
  SITE 6: note = (S)-3-(2-amino-2-carboxyethyl)benzoic acid
  SITE 7: note = 2-amino-2-methylpropanoic acid
  SITE 10: note = L-lysine, useful for stapling/stapled with another amino acid residue comprising a side chain acid group to form a staple through the 6-amino group
  SITE 11: note (S)-3-amino-1-((pent-4-en-1-yloxy)carbonyl)pyrrolidine-3-ca rboxylic acid, useful for stapling/stapled with another amino acid residue comprising an olefin group to form a staple through the olefin group
  SITE 12: note = (S)-2-aminoheptanoic acid
  SITE 13: note = (S)-2-amino-3-(benzo[b]thiophen-3-yl)propanoic acid
  SITE 14: note = L-glutamic acid, useful for stapling/stapled with another amino acid residue comprising a side chain amino group to form a staple through the 4-carboxyl group
  SITE 16: note = C-term amino
XDXXDXXAFKXXXELS

SEQ ID NO: 685 - protein, 16 aa, synthetic construct
  SITE 1: note = N-term Acetic Acid
  SITE 1: note = (R)-2-allylpyrrolidine-2-carboxylic acid, useful for stapling/stapled with another amino acid residue comprising an olefin group to form a staple through the olefin group
  SITE 3: note = (S)-2-amino-4,4-dimethylpentanoic acid
  VARIANT 4: note = 2-amino-2-(pent-4-en-1-yl)hept-6-enoic acid, useful for stapling/stapled with another amino acid residue comprising an olefin group to form a staple through one of the two olefin groups and/or with another amino acid residue comprising an olefin group to form a staple through the other of the two olefin groups
  SITE 6: note = (S)-3-(2-amino-2-carboxyethyl)benzoic acid
  SITE 7: note = 2-amino-2-methylpropanoic acid
  SITE 10: note = L-lysine, useful for stapling/stapled with another amino acid residue comprising a side chain acid group to form a staple through the 6-amino group
  SITE 11: note (S)-3-amino-1-((pent-4-en-1-yloxy)carbonyl)pyrrolidine-3-ca rboxylic acid, useful for stapling/stapled with another amino acid residue comprising an olefin group to form a staple through the olefin group
  SITE 12: note = (S)-2-aminoheptanoic acid
  SITE 13: note = (S)-2-amino-3-(3,4-dichlorophenyl)propanoic acid
  SITE 14: note = L-glutamic acid, useful for stapling/stapled with another amino acid residue comprising a side chain amino group to form a staple through the 4-carboxyl group
  SITE 16: note = C-term amino
XDXXDXXAFKXXXELS

SEQ ID NO: 686 - protein, 15 aa, synthetic construct
  SITE 1: note = N-term Acetic Acid
  SITE 1: note = (R)-2-allylpyrrolidine-2-carboxylic acid, useful for stapling/stapled with another amino acid residue comprising an olefin group to form a staple through the olefin group
  SITE 2: note = D-isoaspartic acid
  SITE 3: note = (S)-2-amino-4,4-dimethylpentanoic acid
  VARIANT 4: note = 2-amino-2-(pent-4-en-1-yl)hept-6-enoic acid, useful for stapling/stapled with another amino acid residue comprising an olefin group to form a staple through one of the two olefin groups and/or with another amino acid residue comprising an olefin group to form a staple through the other of the two olefin groups
  SITE 6: note = (S)-3-(2-amino-2-carboxyethyl)benzoic acid
  SITE 7: note = 2-amino-2-methylpropanoic acid
  SITE 10: note = L-lysine, useful for stapling/stapled with another amino acid residue comprising a side chain acid group to form a staple through the 6-amino group
  SITE 11: note (S)-3-amino-1-((pent-4-en-1-yloxy)carbonyl)pyrrolidine-3-ca rboxylic acid, useful for stapling/stapled with another amino acid residue comprising an olefin group to form a staple through the olefin group
  SITE 12: note = (S)-2-amino-3-(thiophen-3-yl)propanoic acid
  SITE 13: note = (S)-2-amino-3-(benzo[b]thiophen-3-yl)propanoic acid
  SITE 14: note = L-glutamic acid, useful for stapling/stapled with another amino acid residue comprising a side chain amino group to form a staple through the 4-carboxyl group
  SITE 15: note = C-term amino
XDXXDXXAFKXXXEA

SEQ ID NO: 687 - protein, 15 aa, synthetic construct
  SITE 1: note = N-term Acetic Acid
  SITE 1: note = (R)-2-allylpyrrolidine-2-carboxylic acid, useful for stapling/stapled with another amino acid residue comprising an olefin group to form a staple through the olefin group
  SITE 2: note = L-isoglutamic acid
  SITE 3: note = (S)-2-amino-4,4-dimethylpentanoic acid
  VARIANT 4: note = 2-amino-2-(pent-4-en-1-yl)hept-6-enoic acid, useful for stapling/stapled with another amino acid residue comprising an olefin group to form a staple through one of the two olefin groups and/or with another amino acid residue comprising an olefin group to form a staple through the other of the two olefin groups
  SITE 6: note = (S)-3-(2-amino-2-carboxyethyl)benzoic acid
  SITE 7: note = 2-amino-2-methylpropanoic acid
  SITE 10: note = L-lysine, useful for stapling/stapled with another amino acid residue comprising a side chain acid group to form a staple through the 6-amino group
  SITE 11: note (S)-3-amino-1-((pent-4-en-1-yloxy)carbonyl)pyrrolidine-3-ca rboxylic acid, useful for stapling/stapled with another amino acid residue comprising an olefin group to form a staple through the olefin group
  SITE 12: note = (S)-2-amino-3-(thiophen-3-yl)propanoic acid
  SITE 13: note = (S)-2-amino-3-(benzo[b]thiophen-3-yl)propanoic acid
  SITE 14: note = L-glutamic acid, useful for stapling/stapled with another amino acid residue comprising a side chain amino group to form a staple through the 4-carboxyl group
  SITE 15: note = C-term amino
XEXXDXXAFKXXXEA

SEQ ID NO: 688 - protein, 15 aa, synthetic construct
  SITE 1: note = N-term Acetic Acid
  SITE 1: note = (R)-2-allylpyrrolidine-2-carboxylic acid, useful for stapling/stapled with another amino acid residue comprising an olefin group to form a staple through the olefin group
  SITE 2: note = D-isoglutamic acid
  SITE 3: note = (S)-2-amino-4,4-dimethylpentanoic acid
  VARIANT 4: note = 2-amino-2-(pent-4-en-1-yl)hept-6-enoic acid, useful for stapling/stapled with another amino acid residue comprising an olefin group to form a staple through one of the two olefin groups and/or with another amino acid residue comprising an olefin group to form a staple through the other of the two olefin groups
  SITE 6: note = (S)-3-(2-amino-2-carboxyethyl)benzoic acid
  SITE 7: note = 2-amino-2-methylpropanoic acid
  SITE 10: note = L-lysine, useful for stapling/stapled with another amino acid residue comprising a side chain acid group to form a staple through the 6-amino group
  SITE 11: note (S)-3-amino-1-((pent-4-en-1-yloxy)carbonyl)pyrrolidine-3-ca rboxylic acid, useful for stapling/stapled with another amino acid residue comprising an olefin group to form a staple through the olefin group
  SITE 12: note = (S)-2-amino-3-(thiophen-3-yl)propanoic acid
  SITE 13: note = (S)-2-amino-3-(benzo[b]thiophen-3-yl)propanoic acid
  SITE 14: note = L-glutamic acid, useful for stapling/stapled with another amino acid residue comprising a side chain amino group to form a staple through the 4-carboxyl group
  SITE 15: note = C-term amino
XEXXDXXAFKXXXEA

SEQ ID NO: 689 - protein, 15 aa, synthetic construct
  SITE 1: note = N-term Acetic Acid
  SITE 1: note = (R)-2-allylpyrrolidine-2-carboxylic acid, useful for stapling/stapled with another amino acid residue comprising an olefin group to form a staple through the olefin group
  SITE 2: note = 3-aminopentanedioic acid
  SITE 3: note = (S)-2-amino-4,4-dimethylpentanoic acid
  VARIANT 4: note = 2-amino-2-(pent-4-en-1-yl)hept-6-enoic acid, useful for stapling/stapled with another amino acid residue comprising an olefin group to form a staple through one of the two olefin groups and/or with another amino acid residue comprising an olefin group to form a staple through the other of the two olefin groups
  SITE 6: note = (S)-3-(2-amino-2-carboxyethyl)benzoic acid
  SITE 7: note = 2-amino-2-methylpropanoic acid
  SITE 10: note = L-lysine, useful for stapling/stapled with another amino acid residue comprising a side chain acid group to form a staple through the 6-amino group
  SITE 11: note (S)-3-amino-1-((pent-4-en-1-yloxy)carbonyl)pyrrolidine-3-ca rboxylic acid, useful for stapling/stapled with another amino acid residue comprising an olefin group to form a staple through the olefin group
  SITE 12: note = (S)-2-amino-3-(thiophen-3-yl)propanoic acid
  SITE 13: note = (S)-2-amino-3-(benzo[b]thiophen-3-yl)propanoic acid
  SITE 14: note = L-glutamic acid, useful for stapling/stapled with another amino acid residue comprising a side chain amino group to form a staple through the 4-carboxyl group
  SITE 15: note = C-term amino
XXXXDXXAFKXXXEA

SEQ ID NO: 690 - protein, 15 aa, synthetic construct
  SITE 1: note = N-term Acetic Acid
  SITE 1: note = (R)-2-allylpyrrolidine-2-carboxylic acid, useful for stapling/stapled with another amino acid residue comprising an olefin group to form a staple through the olefin group
  SITE 2: note = 3-aminopentanedioic acid
  SITE 3: note = (S)-2-amino-4,4-dimethylpentanoic acid
  VARIANT 4: note = 2-amino-2-(pent-4-en-1-yl)hept-6-enoic acid, useful for stapling/stapled with another amino acid residue comprising an olefin group to form a staple through one of the two olefin groups and/or with another amino acid residue comprising an olefin group to form a staple through the other of the two olefin groups
  SITE 6: note = (S)-3-(2-amino-2-carboxyethyl)benzoic acid
  SITE 7: note = 2-amino-2-methylpropanoic acid
  SITE 10: note = L-lysine, useful for stapling/stapled with another amino acid residue comprising a side chain acid group to form a staple through the 6-amino group
  SITE 11: note (S)-3-amino-1-((pent-4-en-1-yloxy)carbonyl)pyrrolidine-3-ca rboxylic acid, useful for stapling/stapled with another amino acid residue comprising an olefin group to form a staple through the olefin group
  SITE 12: note = (S)-2-amino-3-(thiophen-3-yl)propanoic acid
  SITE 13: note = (S)-2-amino-3-(benzo[b]thiophen-3-yl)propanoic acid
  SITE 14: note = L-glutamic acid, useful for stapling/stapled with another amino acid residue comprising a side chain amino group to form a staple through the 4-carboxyl group
  SITE 15: note = C-term amino
XXXXDXXAFKXXXEA

SEQ ID NO: 691 - protein, 15 aa, synthetic construct
  SITE 1: note = N-term Acetic Acid
  SITE 1: note = (R)-2-allylpyrrolidine-2-carboxylic acid, useful for stapling/stapled with another amino acid residue comprising an olefin group to form a staple through the olefin group
  VARIANT 4: note = 2-amino-2-(pent-4-en-1-yl)hept-6-enoic acid, useful for stapling/stapled with another amino acid residue comprising an olefin group to form a staple through one of the two olefin groups and/or with another amino acid residue comprising an olefin group to form a staple through the other of the two olefin groups
  SITE 6: note = (S)-3-(2-amino-2-carboxyethyl)benzoic acid
  SITE 10: note = L-lysine, useful for stapling/stapled with another amino acid residue comprising a side chain acid group to form a staple through the 6-amino group
  SITE 11: note (S)-3-amino-1-((pent-4-en-1-yloxy)carbonyl)pyrrolidine-3-ca rboxylic acid, useful for stapling/stapled with another amino acid residue comprising an olefin group to form a staple through the olefin group
  SITE 12: note = (S)-2-amino-3-(thiophen-3-yl)propanoic acid
  SITE 13: note = (S)-2-amino-3-(benzo[b]thiophen-3-yl)propanoic acid
  SITE 14: note = L-glutamic acid, useful for stapling/stapled with another amino acid residue comprising a side chain amino group to form a staple through the 4-carboxyl group
  SITE 15: note = C-term amino
XDIXDXAAFKXXXEA

SEQ ID NO: 692 - protein, 15 aa, synthetic construct
  SITE 1: note = N-term Acetic Acid
  SITE 1: note = (R)-2-allylpyrrolidine-2-carboxylic acid, useful for stapling/stapled with another amino acid residue comprising an olefin group to form a staple through the olefin group
  VARIANT 4: note = 2-amino-2-(pent-4-en-1-yl)hept-6-enoic acid, useful for stapling/stapled with another amino acid residue comprising an olefin group to form a staple through one of the two olefin groups and/or with another amino acid residue comprising an olefin group to form a staple through the other of the two olefin groups
  SITE 6: note = (S)-3-(2-amino-2-carboxyethyl)benzoic acid
  SITE 10: note = L-lysine, useful for stapling/stapled with another amino acid residue comprising a side chain acid group to form a staple through the 6-amino group
  SITE 11: note (S)-3-amino-1-((pent-4-en-1-yloxy)carbonyl)pyrrolidine-3-ca rboxylic acid, useful for stapling/stapled with another amino acid residue comprising an olefin group to form a staple through the olefin group
  SITE 12: note = (S)-2-amino-3-(thiophen-3-yl)propanoic acid
  SITE 13: note = (S)-2-amino-3-(benzo[b]thiophen-3-yl)propanoic acid
  SITE 14: note = L-glutamic acid, useful for stapling/stapled with another amino acid residue comprising a side chain amino group to form a staple through the 4-carboxyl group
  SITE 15: note = C-term amino
XDIXDXVAFKXXXEA

SEQ ID NO: 693 - protein, 15 aa, synthetic construct
  SITE 1: note = N-term Acetic Acid
  SITE 1: note = (R)-2-allylpyrrolidine-2-carboxylic acid, useful for stapling/stapled with another amino acid residue comprising an olefin group to form a staple through the olefin group
  VARIANT 4: note = 2-amino-2-(pent-4-en-1-yl)hept-6-enoic acid, useful for stapling/stapled with another amino acid residue comprising an olefin group to form a staple through one of the two olefin groups and/or with another amino acid residue comprising an olefin group to form a staple through the other of the two olefin groups
  SITE 6: note = (S)-3-(2-amino-2-carboxyethyl)benzoic acid
  SITE 10: note = L-lysine, useful for stapling/stapled with another amino acid residue comprising a side chain acid group to form a staple through the 6-amino group
  SITE 11: note (S)-3-amino-1-((pent-4-en-1-yloxy)carbonyl)pyrrolidine-3-ca rboxylic acid, useful for stapling/stapled with another amino acid residue comprising an olefin group to form a staple through the olefin group
  SITE 12: note = (S)-2-amino-3-(thiophen-3-yl)propanoic acid
  SITE 13: note = (S)-2-amino-3-(benzo[b]thiophen-3-yl)propanoic acid
  SITE 14: note = L-glutamic acid, useful for stapling/stapled with another amino acid residue comprising a side chain amino group to form a staple through the 4-carboxyl group
  SITE 15: note = C-term amino
XDIXDXLAFKXXXEA

SEQ ID NO: 694 - protein, 15 aa, synthetic construct
  SITE 1: note = N-term Acetic Acid
  SITE 1: note = (R)-2-allylpyrrolidine-2-carboxylic acid, useful for stapling/stapled with another amino acid residue comprising an olefin group to form a staple through the olefin group
  VARIANT 4: note = 2-amino-2-(pent-4-en-1-yl)hept-6-enoic acid, useful for stapling/stapled with another amino acid residue comprising an olefin group to form a staple through one of the two olefin groups and/or with another amino acid residue comprising an olefin group to form a staple through the other of the two olefin groups
  SITE 6: note = (S)-3-(2-amino-2-carboxyethyl)benzoic acid
  SITE 7: note = (S)-2-aminohexanoic acid
  SITE 10: note = L-lysine, useful for stapling/stapled with another amino acid residue comprising a side chain acid group to form a staple through the 6-amino group
  SITE 11: note (S)-3-amino-1-((pent-4-en-1-yloxy)carbonyl)pyrrolidine-3-ca rboxylic acid, useful for stapling/stapled with another amino acid residue comprising an olefin group to form a staple through the olefin group
  SITE 12: note = (S)-2-amino-3-(thiophen-3-yl)propanoic acid
  SITE 13: note = (S)-2-amino-3-(benzo[b]thiophen-3-yl)propanoic acid
  SITE 14: note = L-glutamic acid, useful for stapling/stapled with another amino acid residue comprising a side chain amino group to form a staple through the 4-carboxyl group
  SITE 15: note = C-term amino
XDIXDXXAFKXXXEA

SEQ ID NO: 695 - protein, 15 aa, synthetic construct
  SITE 1: note = N-term Acetic Acid
  SITE 1: note = (R)-2-allylpyrrolidine-2-carboxylic acid, useful for stapling/stapled with another amino acid residue comprising an olefin group to form a staple through the olefin group
  VARIANT 4: note = 2-amino-2-(pent-4-en-1-yl)hept-6-enoic acid, useful for stapling/stapled with another amino acid residue comprising an olefin group to form a staple through one of the two olefin groups and/or with another amino acid residue comprising an olefin group to form a staple through the other of the two olefin groups
  SITE 6: note = (S)-3-(2-amino-2-carboxyethyl)benzoic acid
  SITE 7: note = 2-amino-2-propylpentanoic acid
  SITE 10: note = L-lysine, useful for stapling/stapled with another amino acid residue comprising a side chain acid group to form a staple through the 6-amino group
  SITE 11: note (S)-3-amino-1-((pent-4-en-1-yloxy)carbonyl)pyrrolidine-3-ca rboxylic acid, useful for stapling/stapled with another amino acid residue comprising an olefin group to form a staple through the olefin group
  SITE 12: note = (S)-2-amino-3-(thiophen-3-yl)propanoic acid
  SITE 13: note = (S)-2-amino-3-(benzo[b]thiophen-3-yl)propanoic acid
  SITE 14: note = L-glutamic acid, useful for stapling/stapled with another amino acid residue comprising a side chain amino group to form a staple through the 4-carboxyl group
  SITE 15: note = C-term amino
XDIXDXXAFKXXXEA

SEQ ID NO: 696 - protein, 15 aa, synthetic construct
  SITE 1: note = N-term Acetic Acid
  SITE 1: note = (R)-2-allylpyrrolidine-2-carboxylic acid, useful for stapling/stapled with another amino acid residue comprising an olefin group to form a staple through the olefin group
  SITE 3: note = (S)-2-amino-2-cyclohexylacetic acid
  VARIANT 4: note = 2-amino-2-(pent-4-en-1-yl)hept-6-enoic acid, useful for stapling/stapled with another amino acid residue comprising an olefin group to form a staple through one of the two olefin groups and/or with another amino acid residue comprising an olefin group to form a staple through the other of the two olefin groups
  SITE 6: note = (S)-3-(2-amino-2-carboxyethyl)benzoic acid
  SITE 10: note = L-lysine, useful for stapling/stapled with another amino acid residue comprising a side chain acid group to form a staple through the 6-amino group
  SITE 11: note (S)-3-amino-1-((pent-4-en-1-yloxy)carbonyl)pyrrolidine-3-ca rboxylic acid, useful for stapling/stapled with another amino acid residue comprising an olefin group to form a staple through the olefin group
  SITE 12: note = (S)-2-amino-3-(thiophen-3-yl)propanoic acid
  SITE 13: note = (S)-2-amino-3-(benzo[b]thiophen-3-yl)propanoic acid
  SITE 14: note = L-glutamic acid, useful for stapling/stapled with another amino acid residue comprising a side chain amino group to form a staple through the 4-carboxyl group
  SITE 15: note = C-term amino
XDXXDXAAFKXXXEA

SEQ ID NO: 697 - protein, 15 aa, synthetic construct
  SITE 1: note = N-term Acetic Acid
  SITE 1: note = (R)-2-allylpyrrolidine-2-carboxylic acid, useful for stapling/stapled with another amino acid residue comprising an olefin group to form a staple through the olefin group
  SITE 3: note = (S)-2-amino-2-cyclohexylacetic acid
  VARIANT 4: note = 2-amino-2-(pent-4-en-1-yl)hept-6-enoic acid, useful for stapling/stapled with another amino acid residue comprising an olefin group to form a staple through one of the two olefin groups and/or with another amino acid residue comprising an olefin group to form a staple through the other of the two olefin groups
  SITE 6: note = (S)-3-(2-amino-2-carboxyethyl)benzoic acid
  SITE 10: note = L-lysine, useful for stapling/stapled with another amino acid residue comprising a side chain acid group to form a staple through the 6-amino group
  SITE 11: note (S)-3-amino-1-((pent-4-en-1-yloxy)carbonyl)pyrrolidine-3-ca rboxylic acid, useful for stapling/stapled with another amino acid residue comprising an olefin group to form a staple through the olefin group
  SITE 12: note = (S)-2-amino-3-(thiophen-3-yl)propanoic acid
  SITE 13: note = (S)-2-amino-3-(benzo[b]thiophen-3-yl)propanoic acid
  SITE 14: note = L-glutamic acid, useful for stapling/stapled with another amino acid residue comprising a side chain amino group to form a staple through the 4-carboxyl group
  SITE 15: note = C-term amino
XDXXDXVAFKXXXEA

SEQ ID NO: 698 - protein, 15 aa, synthetic construct
  SITE 1: note = N-term Acetic Acid
  SITE 1: note = (R)-2-allylpyrrolidine-2-carboxylic acid, useful for stapling/stapled with another amino acid residue comprising an olefin group to form a staple through the olefin group
  SITE 3: note = (S)-2-amino-2-cyclohexylacetic acid
  VARIANT 4: note = 2-amino-2-(pent-4-en-1-yl)hept-6-enoic acid, useful for stapling/stapled with another amino acid residue comprising an olefin group to form a staple through one of the two olefin groups and/or with another amino acid residue comprising an olefin group to form a staple through the other of the two olefin groups
  SITE 6: note = (S)-3-(2-amino-2-carboxyethyl)benzoic acid
  SITE 7: note = (S)-2-aminohexanoic acid
  SITE 10: note = L-lysine, useful for stapling/stapled with another amino acid residue comprising a side chain acid group to form a staple through the 6-amino group
  SITE 11: note (S)-3-amino-1-((pent-4-en-1-yloxy)carbonyl)pyrrolidine-3-ca rboxylic acid, useful for stapling/stapled with another amino acid residue comprising an olefin group to form a staple through the olefin group
  SITE 12: note = (S)-2-amino-3-(thiophen-3-yl)propanoic acid
  SITE 13: note = (S)-2-amino-3-(benzo[b]thiophen-3-yl)propanoic acid
  SITE 14: note = L-glutamic acid, useful for stapling/stapled with another amino acid residue comprising a side chain amino group to form a staple through the 4-carboxyl group
  SITE 15: note = C-term amino
XDXXDXXAFKXXXEA

SEQ ID NO: 699 - protein, 15 aa, synthetic construct
  SITE 1: note = N-term Acetic Acid
  SITE 1: note = (R)-2-allylpyrrolidine-2-carboxylic acid, useful for stapling/stapled with another amino acid residue comprising an olefin group to form a staple through the olefin group
  SITE 3: note = (S)-2-amino-2-cyclohexylacetic acid
  VARIANT 4: note = 2-amino-2-(pent-4-en-1-yl)hept-6-enoic acid, useful for stapling/stapled with another amino acid residue comprising an olefin group to form a staple through one of the two olefin groups and/or with another amino acid residue comprising an olefin group to form a staple through the other of the two olefin groups
  SITE 6: note = (S)-3-(2-amino-2-carboxyethyl)benzoic acid
  SITE 7: note = 2-amino-2-propylpentanoic acid
  SITE 10: note = L-lysine, useful for stapling/stapled with another amino acid residue comprising a side chain acid group to form a staple through the 6-amino group
  SITE 11: note (S)-3-amino-1-((pent-4-en-1-yloxy)carbonyl)pyrrolidine-3-ca rboxylic acid, useful for stapling/stapled with another amino acid residue comprising an olefin group to form a staple through the olefin group
  SITE 12: note = (S)-2-amino-3-(thiophen-3-yl)propanoic acid
  SITE 13: note = (S)-2-amino-3-(benzo[b]thiophen-3-yl)propanoic acid
  SITE 14: note = L-glutamic acid, useful for stapling/stapled with another amino acid residue comprising a side chain amino group to form a staple through the 4-carboxyl group
  SITE 15: note = C-term amino
XDXXDXXAFKXXXEA

SEQ ID NO: 700 - protein, 15 aa, synthetic construct
  SITE 1: note = N-term Acetic Acid
  SITE 1: note = (R)-2-allylpyrrolidine-2-carboxylic acid, useful for stapling/stapled with another amino acid residue comprising an olefin group to form a staple through the olefin group
  SITE 3: note = (S)-2-amino-3,3-diphenylpropanoic acid
  VARIANT 4: note = 2-amino-2-(pent-4-en-1-yl)hept-6-enoic acid, useful for stapling/stapled with another amino acid residue comprising an olefin group to form a staple through one of the two olefin groups and/or with another amino acid residue comprising an olefin group to form a staple through the other of the two olefin groups
  SITE 6: note = (S)-3-(2-amino-2-carboxyethyl)benzoic acid
  SITE 10: note = L-lysine, useful for stapling/stapled with another amino acid residue comprising a side chain acid group to form a staple through the 6-amino group
  SITE 11: note (S)-3-amino-1-((pent-4-en-1-yloxy)carbonyl)pyrrolidine-3-ca rboxylic acid, useful for stapling/stapled with another amino acid residue comprising an olefin group to form a staple through the olefin group
  SITE 12: note = (S)-2-amino-3-(thiophen-3-yl)propanoic acid
  SITE 13: note = (S)-2-amino-3-(benzo[b]thiophen-3-yl)propanoic acid
  SITE 14: note = L-glutamic acid, useful for stapling/stapled with another amino acid residue comprising a side chain amino group to form a staple through the 4-carboxyl group
  SITE 15: note = C-term amino
XDXXDXAAFKXXXEA

SEQ ID NO: 701 - protein, 15 aa, synthetic construct
  SITE 1: note = N-term Acetic Acid
  SITE 1: note = (R)-2-allylpyrrolidine-2-carboxylic acid, useful for stapling/stapled with another amino acid residue comprising an olefin group to form a staple through the olefin group
  SITE 3: note = (S)-2-amino-3,3-diphenylpropanoic acid
  VARIANT 4: note = 2-amino-2-(pent-4-en-1-yl)hept-6-enoic acid, useful for stapling/stapled with another amino acid residue comprising an olefin group to form a staple through one of the two olefin groups and/or with another amino acid residue comprising an olefin group to form a staple through the other of the two olefin groups
  SITE 6: note = (S)-3-(2-amino-2-carboxyethyl)benzoic acid
  SITE 10: note = L-lysine, useful for stapling/stapled with another amino acid residue comprising a side chain acid group to form a staple through the 6-amino group
  SITE 11: note (S)-3-amino-1-((pent-4-en-1-yloxy)carbonyl)pyrrolidine-3-ca rboxylic acid, useful for stapling/stapled with another amino acid residue comprising an olefin group to form a staple through the olefin group
  SITE 12: note = (S)-2-amino-3-(thiophen-3-yl)propanoic acid
  SITE 13: note = (S)-2-amino-3-(benzo[b]thiophen-3-yl)propanoic acid
  SITE 14: note = L-glutamic acid, useful for stapling/stapled with another amino acid residue comprising a side chain amino group to form a staple through the 4-carboxyl group
  SITE 15: note = C-term amino
XDXXDXVAFKXXXEA

SEQ ID NO: 702 - protein, 15 aa, synthetic construct
  SITE 1: note = N-term Acetic Acid
  SITE 1: note = (R)-2-allylpyrrolidine-2-carboxylic acid, useful for stapling/stapled with another amino acid residue comprising an olefin group to form a staple through the olefin group
  SITE 3: note = (S)-2-amino-3,3-diphenylpropanoic acid
  VARIANT 4: note = 2-amino-2-(pent-4-en-1-yl)hept-6-enoic acid, useful for stapling/stapled with another amino acid residue comprising an olefin group to form a staple through one of the two olefin groups and/or with another amino acid residue comprising an olefin group to form a staple through the other of the two olefin groups
  SITE 6: note = (S)-3-(2-amino-2-carboxyethyl)benzoic acid
  SITE 10: note = L-lysine, useful for stapling/stapled with another amino acid residue comprising a side chain acid group to form a staple through the 6-amino group
  SITE 11: note (S)-3-amino-1-((pent-4-en-1-yloxy)carbonyl)pyrrolidine-3-ca rboxylic acid, useful for stapling/stapled with another amino acid residue comprising an olefin group to form a staple through the olefin group
  SITE 12: note = (S)-2-amino-3-(thiophen-3-yl)propanoic acid
  SITE 13: note = (S)-2-amino-3-(benzo[b]thiophen-3-yl)propanoic acid
  SITE 14: note = L-glutamic acid, useful for stapling/stapled with another amino acid residue comprising a side chain amino group to form a staple through the 4-carboxyl group
  SITE 15: note = C-term amino
XDXXDXLAFKXXXEA

SEQ ID NO: 703 - protein, 15 aa, synthetic construct
  SITE 1: note = N-term Acetic Acid
  SITE 1: note = (R)-2-allylpyrrolidine-2-carboxylic acid, useful for stapling/stapled with another amino acid residue comprising an olefin group to form a staple through the olefin group
  SITE 3: note = (S)-2-amino-3,3-diphenylpropanoic acid
  VARIANT 4: note = 2-amino-2-(pent-4-en-1-yl)hept-6-enoic acid, useful for stapling/stapled with another amino acid residue comprising an olefin group to form a staple through one of the two olefin groups and/or with another amino acid residue comprising an olefin group to form a staple through the other of the two olefin groups
  SITE 6: note = (S)-3-(2-amino-2-carboxyethyl)benzoic acid
  SITE 7: note = (S)-2-aminohexanoic acid
  SITE 10: note = L-lysine, useful for stapling/stapled with another amino acid residue comprising a side chain acid group to form a staple through the 6-amino group
  SITE 11: note (S)-3-amino-1-((pent-4-en-1-yloxy)carbonyl)pyrrolidine-3-ca rboxylic acid, useful for stapling/stapled with another amino acid residue comprising an olefin group to form a staple through the olefin group
  SITE 12: note = (S)-2-amino-3-(thiophen-3-yl)propanoic acid
  SITE 13: note = (S)-2-amino-3-(benzo[b]thiophen-3-yl)propanoic acid
  SITE 14: note = L-glutamic acid, useful for stapling/stapled with another amino acid residue comprising a side chain amino group to form a staple through the 4-carboxyl group
  SITE 15: note = C-term amino
XDXXDXXAFKXXXEA

SEQ ID NO: 704 - protein, 15 aa, synthetic construct
  SITE 1: note = N-term Acetic Acid
  SITE 1: note = (R)-2-allylpyrrolidine-2-carboxylic acid, useful for stapling/stapled with another amino acid residue comprising an olefin group to form a staple through the olefin group
  SITE 3: note = (S)-2-amino-3-cyclobutylpropanoic acid
  VARIANT 4: note = 2-amino-2-(pent-4-en-1-yl)hept-6-enoic acid, useful for stapling/stapled with another amino acid residue comprising an olefin group to form a staple through one of the two olefin groups and/or with another amino acid residue comprising an olefin group to form a staple through the other of the two olefin groups
  SITE 6: note = (S)-3-(2-amino-2-carboxyethyl)benzoic acid
  SITE 10: note = L-lysine, useful for stapling/stapled with another amino acid residue comprising a side chain acid group to form a staple through the 6-amino group
  SITE 11: note (S)-3-amino-1-((pent-4-en-1-yloxy)carbonyl)pyrrolidine-3-ca rboxylic acid, useful for stapling/stapled with another amino acid residue comprising an olefin group to form a staple through the olefin group
  SITE 12: note = (S)-2-amino-3-(thiophen-3-yl)propanoic acid
  SITE 13: note = (S)-2-amino-3-(benzo[b]thiophen-3-yl)propanoic acid
  SITE 14: note = L-glutamic acid, useful for stapling/stapled with another amino acid residue comprising a side chain amino group to form a staple through the 4-carboxyl group
  SITE 15: note = C-term amino
XDXXDXAAFKXXXEA

SEQ ID NO: 705 - protein, 15 aa, synthetic construct
  SITE 1: note = N-term Acetic Acid
  SITE 1: note = (R)-2-allylpyrrolidine-2-carboxylic acid, useful for stapling/stapled with another amino acid residue comprising an olefin group to form a staple through the olefin group
  SITE 3: note = (S)-2-amino-3-cyclobutylpropanoic acid
  VARIANT 4: note = 2-amino-2-(pent-4-en-1-yl)hept-6-enoic acid, useful for stapling/stapled with another amino acid residue comprising an olefin group to form a staple through one of the two olefin groups and/or with another amino acid residue comprising an olefin group to form a staple through the other of the two olefin groups
  SITE 6: note = (S)-3-(2-amino-2-carboxyethyl)benzoic acid
  SITE 10: note = L-lysine, useful for stapling/stapled with another amino acid residue comprising a side chain acid group to form a staple through the 6-amino group
  SITE 11: note (S)-3-amino-1-((pent-4-en-1-yloxy)carbonyl)pyrrolidine-3-ca rboxylic acid, useful for stapling/stapled with another amino acid residue comprising an olefin group to form a staple through the olefin group
  SITE 12: note = (S)-2-amino-3-(thiophen-3-yl)propanoic acid
  SITE 13: note = (S)-2-amino-3-(benzo[b]thiophen-3-yl)propanoic acid
  SITE 14: note = L-glutamic acid, useful for stapling/stapled with another amino acid residue comprising a side chain amino group to form a staple through the 4-carboxyl group
  SITE 15: note = C-term amino
XDXXDXVAFKXXXEA

SEQ ID NO: 706 - protein, 15 aa, synthetic construct
  SITE 1: note = N-term Acetic Acid
  SITE 1: note = (R)-2-allylpyrrolidine-2-carboxylic acid, useful for stapling/stapled with another amino acid residue comprising an olefin group to form a staple through the olefin group
  SITE 3: note = (S)-2-amino-3-cyclobutylpropanoic acid
  VARIANT 4: note = 2-amino-2-(pent-4-en-1-yl)hept-6-enoic acid, useful for stapling/stapled with another amino acid residue comprising an olefin group to form a staple through one of the two olefin groups and/or with another amino acid residue comprising an olefin group to form a staple through the other of the two olefin groups
  SITE 6: note = (S)-3-(2-amino-2-carboxyethyl)benzoic acid
  SITE 10: note = L-lysine, useful for stapling/stapled with another amino acid residue comprising a side chain acid group to form a staple through the 6-amino group
  SITE 11: note (S)-3-amino-1-((pent-4-en-1-yloxy)carbonyl)pyrrolidine-3-ca rboxylic acid, useful for stapling/stapled with another amino acid residue comprising an olefin group to form a staple through the olefin group
  SITE 12: note = (S)-2-amino-3-(thiophen-3-yl)propanoic acid
  SITE 13: note = (S)-2-amino-3-(benzo[b]thiophen-3-yl)propanoic acid
  SITE 14: note = L-glutamic acid, useful for stapling/stapled with another amino acid residue comprising a side chain amino group to form a staple through the 4-carboxyl group
  SITE 15: note = C-term amino
XDXXDXLAFKXXXEA

SEQ ID NO: 707 - protein, 15 aa, synthetic construct
  SITE 1: note = N-term Acetic Acid
  SITE 1: note = (R)-2-allylpyrrolidine-2-carboxylic acid, useful for stapling/stapled with another amino acid residue comprising an olefin group to form a staple through the olefin group
  SITE 3: note = (S)-2-amino-3-cyclobutylpropanoic acid
  VARIANT 4: note = 2-amino-2-(pent-4-en-1-yl)hept-6-enoic acid, useful for stapling/stapled with another amino acid residue comprising an olefin group to form a staple through one of the two olefin groups and/or with another amino acid residue comprising an olefin group to form a staple through the other of the two olefin groups
  SITE 6: note = (S)-3-(2-amino-2-carboxyethyl)benzoic acid
  SITE 7: note = (S)-2-aminohexanoic acid
  SITE 10: note = L-lysine, useful for stapling/stapled with another amino acid residue comprising a side chain acid group to form a staple through the 6-amino group
  SITE 11: note (S)-3-amino-1-((pent-4-en-1-yloxy)carbonyl)pyrrolidine-3-ca rboxylic acid, useful for stapling/stapled with another amino acid residue comprising an olefin group to form a staple through the olefin group
  SITE 12: note = (S)-2-amino-3-(thiophen-3-yl)propanoic acid
  SITE 13: note = (S)-2-amino-3-(benzo[b]thiophen-3-yl)propanoic acid
  SITE 14: note = L-glutamic acid, useful for stapling/stapled with another amino acid residue comprising a side chain amino group to form a staple through the 4-carboxyl group
  SITE 15: note = C-term amino
XDXXDXXAFKXXXEA

SEQ ID NO: 708 - protein, 15 aa, synthetic construct
  SITE 1: note = N-term Acetic Acid
  SITE 1: note = (R)-2-allylpyrrolidine-2-carboxylic acid, useful for stapling/stapled with another amino acid residue comprising an olefin group to form a staple through the olefin group
  SITE 3: note = (S)-2-amino-3-cyclobutylpropanoic acid
  VARIANT 4: note = 2-amino-2-(pent-4-en-1-yl)hept-6-enoic acid, useful for stapling/stapled with another amino acid residue comprising an olefin group to form a staple through one of the two olefin groups and/or with another amino acid residue comprising an olefin group to form a staple through the other of the two olefin groups
  SITE 6: note = (S)-3-(2-amino-2-carboxyethyl)benzoic acid
  SITE 7: note = 2-amino-2-propylpentanoic acid
  SITE 10: note = L-lysine, useful for stapling/stapled with another amino acid residue comprising a side chain acid group to form a staple through the 6-amino group
  SITE 11: note (S)-3-amino-1-((pent-4-en-1-yloxy)carbonyl)pyrrolidine-3-ca rboxylic acid, useful for stapling/stapled with another amino acid residue comprising an olefin group to form a staple through the olefin group
  SITE 12: note = (S)-2-amino-3-(thiophen-3-yl)propanoic acid
  SITE 13: note = (S)-2-amino-3-(benzo[b]thiophen-3-yl)propanoic acid
  SITE 14: note = L-glutamic acid, useful for stapling/stapled with another amino acid residue comprising a side chain amino group to form a staple through the 4-carboxyl group
  SITE 15: note = C-term amino
XDXXDXXAFKXXXEA

SEQ ID NO: 709 - protein, 15 aa, synthetic construct
  SITE 1: note = N-term hex-5-enoic acid, useful for stapling/stapled with another amino acid residue comprising an olefin group to form a staple through the olefin group
  SITE 1: note = (S)-2-methylpyrrolidine-2-carboxylic acid
  VARIANT 3: note = 2-amino-2-(pent-4-en-1-yl)hept-6-enoic acid, useful for stapling/stapled with another amino acid residue comprising an olefin group to form a staple through one of the two olefin groups and/or with another amino acid residue comprising an olefin group to form a staple through the other of the two olefin groups
  SITE 6: note = (S)-3-(2-amino-2-carboxyethyl)benzoic acid
  SITE 10: note (S)-3-amino-1-((pent-4-en-1-yloxy)carbonyl)pyrrolidine-3-ca rboxylic acid, useful for stapling/stapled with another amino acid residue comprising an olefin group to form a staple through the olefin group
  SITE 11: note = L-lysine, useful for stapling/stapled with another amino acid residue comprising a side chain acid group to form a staple through the 6-amino group
  SITE 12: note = (S)-2-amino-3-(thiophen-3-yl)propanoic acid
  SITE 13: note = (S)-2-amino-3-(benzo[b]thiophen-3-yl)propanoic acid
  SITE 15: note = L-glutamic acid, useful for stapling/stapled with another amino acid residue comprising a side chain amino group to form a staple through the 4-carboxyl group
  SITE 15: note = C-term amino
XDXADXAAFXKXXAE

SEQ ID NO: 710 - protein, 15 aa, synthetic construct
  SITE 1: note = N-term Acetic Acid
  SITE 1: note = (R)-2-allylpyrrolidine-2-carboxylic acid, useful for stapling/stapled with another amino acid residue comprising an olefin group to form a staple through the olefin group
  SITE 3: note = (S)-2-amino-2-cyclohexylacetic acid
  VARIANT 4: note = 2-amino-2-(pent-4-en-1-yl)hept-6-enoic acid, useful for stapling/stapled with another amino acid residue comprising an olefin group to form a staple through one of the two olefin groups and/or with another amino acid residue comprising an olefin group to form a staple through the other of the two olefin groups
  SITE 6: note = (S)-3-(2-amino-2-carboxyethyl)benzoic acid
  SITE 10: note = L-lysine, useful for stapling/stapled with another amino acid residue comprising a side chain acid group to form a staple through the 6-amino group
  SITE 11: note (S)-3-amino-1-((pent-4-en-1-yloxy)carbonyl)pyrrolidine-3-ca rboxylic acid, useful for stapling/stapled with another amino acid residue comprising an olefin group to form a staple through the olefin group
  SITE 12: note = (S)-2-amino-3-(thiophen-3-yl)propanoic acid
  SITE 13: note = (S)-2-amino-3-(benzo[b]thiophen-3-yl)propanoic acid
  SITE 14: note = L-glutamic acid, useful for stapling/stapled with another amino acid residue comprising a side chain amino group to form a staple through the 4-carboxyl group
  SITE 15: note = C-term amino
XDXXDXGAFKXXXEA

SEQ ID NO: 711 - protein, 15 aa, synthetic construct
  SITE 1: note = N-term Acetic Acid
  SITE 1: note = (R)-2-allylpyrrolidine-2-carboxylic acid, useful for stapling/stapled with another amino acid residue comprising an olefin group to form a staple through the olefin group
  SITE 3: note = (S)-2-amino-2-cyclohexylacetic acid
  VARIANT 4: note = 2-amino-2-(pent-4-en-1-yl)hept-6-enoic acid, useful for stapling/stapled with another amino acid residue comprising an olefin group to form a staple through one of the two olefin groups and/or with another amino acid residue comprising an olefin group to form a staple through the other of the two olefin groups
  SITE 6: note = (S)-3-(2-amino-2-carboxyethyl)benzoic acid
  SITE 7: note = D-alanine
  SITE 10: note = L-lysine, useful for stapling/stapled with another amino acid residue comprising a side chain acid group to form a staple through the 6-amino group
  SITE 11: note (S)-3-amino-1-((pent-4-en-1-yloxy)carbonyl)pyrrolidine-3-ca rboxylic acid, useful for stapling/stapled with another amino acid residue comprising an olefin group to form a staple through the olefin group
  SITE 12: note = (S)-2-amino-3-(thiophen-3-yl)propanoic acid
  SITE 13: note = (S)-2-amino-3-(benzo[b]thiophen-3-yl)propanoic acid
  SITE 14: note = L-glutamic acid, useful for stapling/stapled with another amino acid residue comprising a side chain amino group to form a staple through the 4-carboxyl group
  SITE 15: note = C-term amino
XDXXDXAAFKXXXEA

SEQ ID NO: 712 - protein, 15 aa, synthetic construct
  SITE 1: note = N-term Acetic Acid
  SITE 1: note = (R)-2-allylpyrrolidine-2-carboxylic acid, useful for stapling/stapled with another amino acid residue comprising an olefin group to form a staple through the olefin group
  SITE 3: note = (S)-2-amino-2-cyclohexylacetic acid
  VARIANT 4: note = 2-amino-2-(pent-4-en-1-yl)hept-6-enoic acid, useful for stapling/stapled with another amino acid residue comprising an olefin group to form a staple through one of the two olefin groups and/or with another amino acid residue comprising an olefin group to form a staple through the other of the two olefin groups
  SITE 6: note = (S)-3-(2-amino-2-carboxyethyl)benzoic acid
  SITE 7: note = 2-amino-2-methylpropanoic acid
  SITE 10: note = L-lysine, useful for stapling/stapled with another amino acid residue comprising a side chain acid group to form a staple through the 6-amino group
  SITE 11: note (S)-3-amino-1-((pent-4-en-1-yloxy)carbonyl)pyrrolidine-3-ca rboxylic acid, useful for stapling/stapled with another amino acid residue comprising an olefin group to form a staple through the olefin group
  SITE 12: note = (S)-2-amino-3-(thiophen-3-yl)propanoic acid
  SITE 13: note = (S)-2-amino-3-(benzo[b]thiophen-3-yl)propanoic acid
  SITE 14: note = L-glutamic acid, useful for stapling/stapled with another amino acid residue comprising a side chain amino group to form a staple through the 4-carboxyl group
  SITE 15: note = C-term amino
XDXXDXXTFKXXXEA

SEQ ID NO: 713 - protein, 15 aa, synthetic construct
  SITE 1: note = N-term Acetic Acid
  SITE 1: note = (R)-2-allylpyrrolidine-2-carboxylic acid, useful for stapling/stapled with another amino acid residue comprising an olefin group to form a staple through the olefin group
  SITE 3: note = (S)-2-amino-2-cyclohexylacetic acid
  VARIANT 4: note = 2-amino-2-(pent-4-en-1-yl)hept-6-enoic acid, useful for stapling/stapled with another amino acid residue comprising an olefin group to form a staple through one of the two olefin groups and/or with another amino acid residue comprising an olefin group to form a staple through the other of the two olefin groups
  SITE 6: note = (S)-3-(2-amino-2-carboxyethyl)benzoic acid
  SITE 7: note = 2-amino-2-methylpropanoic acid
  SITE 8: note = L-allothreonine
  SITE 10: note = L-lysine, useful for stapling/stapled with another amino acid residue comprising a side chain acid group to form a staple through the 6-amino group
  SITE 11: note (S)-3-amino-1-((pent-4-en-1-yloxy)carbonyl)pyrrolidine-3-ca rboxylic acid, useful for stapling/stapled with another amino acid residue comprising an olefin group to form a staple through the olefin group
  SITE 12: note = (S)-2-amino-3-(thiophen-3-yl)propanoic acid
  SITE 13: note = (S)-2-amino-3-(benzo[b]thiophen-3-yl)propanoic acid
  SITE 14: note = L-glutamic acid, useful for stapling/stapled with another amino acid residue comprising a side chain amino group to form a staple through the 4-carboxyl group
  SITE 15: note = C-term amino
XDXXDXXTFKXXXEA

SEQ ID NO: 714 - protein, 15 aa, synthetic construct
  SITE 1: note = N-term Acetic Acid
  SITE 1: note = (R)-2-allylpyrrolidine-2-carboxylic acid, useful for stapling/stapled with another amino acid residue comprising an olefin group to form a staple through the olefin group
  SITE 3: note = (S)-2-amino-2-cyclohexylacetic acid
  VARIANT 4: note = 2-amino-2-(pent-4-en-1-yl)hept-6-enoic acid, useful for stapling/stapled with another amino acid residue comprising an olefin group to form a staple through one of the two olefin groups and/or with another amino acid residue comprising an olefin group to form a staple through the other of the two olefin groups
  SITE 6: note = (S)-3-(2-amino-2-carboxyethyl)benzoic acid
  SITE 7: note = 2-amino-2-methylpropanoic acid
  SITE 10: note = L-lysine, useful for stapling/stapled with another amino acid residue comprising a side chain acid group to form a staple through the 6-amino group
  SITE 11: note (S)-3-amino-1-((pent-4-en-1-yloxy)carbonyl)pyrrolidine-3-ca rboxylic acid, useful for stapling/stapled with another amino acid residue comprising an olefin group to form a staple through the olefin group
  SITE 12: note = (S)-2-amino-3-(thiophen-3-yl)propanoic acid
  SITE 13: note = (S)-2-amino-3-(benzo[b]thiophen-3-yl)propanoic acid
  SITE 14: note = L-glutamic acid, useful for stapling/stapled with another amino acid residue comprising a side chain amino group to form a staple through the 4-carboxyl group
  SITE 15: note = C-term amino
XDXXDXXGFKXXXEA

SEQ ID NO: 715 - protein, 15 aa, synthetic construct
  SITE 1: note = N-term Acetic Acid
  SITE 1: note = (R)-2-allylpyrrolidine-2-carboxylic acid, useful for stapling/stapled with another amino acid residue comprising an olefin group to form a staple through the olefin group
  SITE 3: note = (S)-2-amino-3,3-diphenylpropanoic acid
  VARIANT 4: note = 2-amino-2-(pent-4-en-1-yl)hept-6-enoic acid, useful for stapling/stapled with another amino acid residue comprising an olefin group to form a staple through one of the two olefin groups and/or with another amino acid residue comprising an olefin group to form a staple through the other of the two olefin groups
  SITE 6: note = (S)-3-(2-amino-2-carboxyethyl)benzoic acid
  SITE 10: note = L-lysine, useful for stapling/stapled with another amino acid residue comprising a side chain acid group to form a staple through the 6-amino group
  SITE 11: note (S)-3-amino-1-((pent-4-en-1-yloxy)carbonyl)pyrrolidine-3-ca rboxylic acid, useful for stapling/stapled with another amino acid residue comprising an olefin group to form a staple through the olefin group
  SITE 12: note = (S)-2-amino-3-(thiophen-3-yl)propanoic acid
  SITE 13: note = (S)-2-amino-3-(benzo[b]thiophen-3-yl)propanoic acid
  SITE 14: note = L-glutamic acid, useful for stapling/stapled with another amino acid residue comprising a side chain amino group to form a staple through the 4-carboxyl group
  SITE 15: note = C-term amino
XDXXDXGAFKXXXEA

SEQ ID NO: 716 - protein, 15 aa, synthetic construct
  SITE 1: note = N-term Acetic Acid
  SITE 1: note = (R)-2-allylpyrrolidine-2-carboxylic acid, useful for stapling/stapled with another amino acid residue comprising an olefin group to form a staple through the olefin group
  SITE 3: note = (S)-2-amino-3,3-diphenylpropanoic acid
  VARIANT 4: note = 2-amino-2-(pent-4-en-1-yl)hept-6-enoic acid, useful for stapling/stapled with another amino acid residue comprising an olefin group to form a staple through one of the two olefin groups and/or with another amino acid residue comprising an olefin group to form a staple through the other of the two olefin groups
  SITE 6: note = (S)-3-(2-amino-2-carboxyethyl)benzoic acid
  SITE 7: note = D-alanine
  SITE 10: note = L-lysine, useful for stapling/stapled with another amino acid residue comprising a side chain acid group to form a staple through the 6-amino group
  SITE 11: note (S)-3-amino-1-((pent-4-en-1-yloxy)carbonyl)pyrrolidine-3-ca rboxylic acid, useful for stapling/stapled with another amino acid residue comprising an olefin group to form a staple through the olefin group
  SITE 12: note = (S)-2-amino-3-(thiophen-3-yl)propanoic acid
  SITE 13: note = (S)-2-amino-3-(benzo[b]thiophen-3-yl)propanoic acid
  SITE 14: note = L-glutamic acid, useful for stapling/stapled with another amino acid residue comprising a side chain amino group to form a staple through the 4-carboxyl group
  SITE 15: note = C-term amino
XDXXDXAAFKXXXEA

SEQ ID NO: 717 - protein, 15 aa, synthetic construct
  SITE 1: note = N-term Acetic Acid
  SITE 1: note = (R)-2-allylpyrrolidine-2-carboxylic acid, useful for stapling/stapled with another amino acid residue comprising an olefin group to form a staple through the olefin group
  SITE 3: note = (S)-2-amino-3,3-diphenylpropanoic acid
  VARIANT 4: note = 2-amino-2-(pent-4-en-1-yl)hept-6-enoic acid, useful for stapling/stapled with another amino acid residue comprising an olefin group to form a staple through one of the two olefin groups and/or with another amino acid residue comprising an olefin group to form a staple through the other of the two olefin groups
  SITE 6: note = (S)-3-(2-amino-2-carboxyethyl)benzoic acid
  SITE 7: note = 2-amino-2-methylpropanoic acid
  SITE 10: note = L-lysine, useful for stapling/stapled with another amino acid residue comprising a side chain acid group to form a staple through the 6-amino group
  SITE 11: note (S)-3-amino-1-((pent-4-en-1-yloxy)carbonyl)pyrrolidine-3-ca rboxylic acid, useful for stapling/stapled with another amino acid residue comprising an olefin group to form a staple through the olefin group
  SITE 12: note = (S)-2-amino-3-(thiophen-3-yl)propanoic acid
  SITE 13: note = (S)-2-amino-3-(benzo[b]thiophen-3-yl)propanoic acid
  SITE 14: note = L-glutamic acid, useful for stapling/stapled with another amino acid residue comprising a side chain amino group to form a staple through the 4-carboxyl group
  SITE 15: note = C-term amino
XDXXDXXSFKXXXEA

SEQ ID NO: 718 - protein, 15 aa, synthetic construct
  SITE 1: note = N-term Acetic Acid
  SITE 1: note = (R)-2-allylpyrrolidine-2-carboxylic acid, useful for stapling/stapled with another amino acid residue comprising an olefin group to form a staple through the olefin group
  SITE 3: note = (S)-2-amino-3,3-diphenylpropanoic acid
  VARIANT 4: note = 2-amino-2-(pent-4-en-1-yl)hept-6-enoic acid, useful for stapling/stapled with another amino acid residue comprising an olefin group to form a staple through one of the two olefin groups and/or with another amino acid residue comprising an olefin group to form a staple through the other of the two olefin groups
  SITE 6: note = (S)-3-(2-amino-2-carboxyethyl)benzoic acid
  SITE 7: note = 2-amino-2-methylpropanoic acid
  SITE 10: note = L-lysine, useful for stapling/stapled with another amino acid residue comprising a side chain acid group to form a staple through the 6-amino group
  SITE 11: note (S)-3-amino-1-((pent-4-en-1-yloxy)carbonyl)pyrrolidine-3-ca rboxylic acid, useful for stapling/stapled with another amino acid residue comprising an olefin group to form a staple through the olefin group
  SITE 12: note = (S)-2-amino-3-(thiophen-3-yl)propanoic acid
  SITE 13: note = (S)-2-amino-3-(benzo[b]thiophen-3-yl)propanoic acid
  SITE 14: note = L-glutamic acid, useful for stapling/stapled with another amino acid residue comprising a side chain amino group to form a staple through the 4-carboxyl group
  SITE 15: note = C-term amino
XDXXDXXTFKXXXEA

SEQ ID NO: 719 - protein, 15 aa, synthetic construct
  SITE 1: note = N-term Acetic Acid
  SITE 1: note = (R)-2-allylpyrrolidine-2-carboxylic acid, useful for stapling/stapled with another amino acid residue comprising an olefin group to form a staple through the olefin group
  SITE 3: note = (S)-2-amino-3,3-diphenylpropanoic acid
  VARIANT 4: note = 2-amino-2-(pent-4-en-1-yl)hept-6-enoic acid, useful for stapling/stapled with another amino acid residue comprising an olefin group to form a staple through one of the two olefin groups and/or with another amino acid residue comprising an olefin group to form a staple through the other of the two olefin groups
  SITE 6: note = (S)-3-(2-amino-2-carboxyethyl)benzoic acid
  SITE 7: note = 2-amino-2-methylpropanoic acid
  SITE 8: note = L-allothreonine
  SITE 10: note = L-lysine, useful for stapling/stapled with another amino acid residue comprising a side chain acid group to form a staple through the 6-amino group
  SITE 11: note (S)-3-amino-1-((pent-4-en-1-yloxy)carbonyl)pyrrolidine-3-ca rboxylic acid, useful for stapling/stapled with another amino acid residue comprising an olefin group to form a staple through the olefin group
  SITE 12: note = (S)-2-amino-3-(thiophen-3-yl)propanoic acid
  SITE 13: note = (S)-2-amino-3-(benzo[b]thiophen-3-yl)propanoic acid
  SITE 14: note = L-glutamic acid, useful for stapling/stapled with another amino acid residue comprising a side chain amino group to form a staple through the 4-carboxyl group
  SITE 15: note = C-term amino
XDXXDXXTFKXXXEA

SEQ ID NO: 720 - protein, 15 aa, synthetic construct
  SITE 1: note = N-term Acetic Acid
  SITE 1: note = (R)-2-allylpyrrolidine-2-carboxylic acid, useful for stapling/stapled with another amino acid residue comprising an olefin group to form a staple through the olefin group
  SITE 3: note = (S)-2-amino-3,3-diphenylpropanoic acid
  VARIANT 4: note = 2-amino-2-(pent-4-en-1-yl)hept-6-enoic acid, useful for stapling/stapled with another amino acid residue comprising an olefin group to form a staple through one of the two olefin groups and/or with another amino acid residue comprising an olefin group to form a staple through the other of the two olefin groups
  SITE 6: note = (S)-3-(2-amino-2-carboxyethyl)benzoic acid
  SITE 7: note = 2-amino-2-methylpropanoic acid
  SITE 10: note = L-lysine, useful for stapling/stapled with another amino acid residue comprising a side chain acid group to form a staple through the 6-amino group
  SITE 11: note (S)-3-amino-1-((pent-4-en-1-yloxy)carbonyl)pyrrolidine-3-ca rboxylic acid, useful for stapling/stapled with another amino acid residue comprising an olefin group to form a staple through the olefin group
  SITE 12: note = (S)-2-amino-3-(thiophen-3-yl)propanoic acid
  SITE 13: note = (S)-2-amino-3-(benzo[b]thiophen-3-yl)propanoic acid
  SITE 14: note = L-glutamic acid, useful for stapling/stapled with another amino acid residue comprising a side chain amino group to form a staple through the 4-carboxyl group
  SITE 15: note = C-term amino
XDXXDXXGFKXXXEA

SEQ ID NO: 721 - protein, 15 aa, synthetic construct
  SITE 1: note = N-term Acetic Acid
  SITE 1: note = (R)-2-allylpyrrolidine-2-carboxylic acid, useful for stapling/stapled with another amino acid residue comprising an olefin group to form a staple through the olefin group
  VARIANT 4: note = 2-amino-2-(pent-4-en-1-yl)hept-6-enoic acid, useful for stapling/stapled with another amino acid residue comprising an olefin group to form a staple through one of the two olefin groups and/or with another amino acid residue comprising an olefin group to form a staple through the other of the two olefin groups
  SITE 6: note = (S)-3-(2-amino-2-carboxyethyl)benzoic acid
  SITE 7: note = 2-amino-2-methylpropanoic acid
  SITE 10: note = L-lysine, useful for stapling/stapled with another amino acid residue comprising a side chain acid group to form a staple through the 6-amino group
  SITE 11: note (S)-3-amino-1-((pent-4-en-1-yloxy)carbonyl)pyrrolidine-3-ca rboxylic acid, useful for stapling/stapled with another amino acid residue comprising an olefin group to form a staple through the olefin group
  SITE 12: note = (S)-2-amino-3-(thiophen-3-yl)propanoic acid
  SITE 13: note = (S)-2-amino-3-(3,4-dichlorophenyl)propanoic acid
  SITE 14: note = L-glutamic acid, useful for stapling/stapled with another amino acid residue comprising a side chain amino group to form a staple through the 4-carboxyl group
  SITE 15: note = C-term amino
XDIXDXXAFKXXXEA

SEQ ID NO: 722 - protein, 15 aa, synthetic construct
  SITE 1: note = N-term Acetic Acid
  SITE 1: note = (R)-2-allylpyrrolidine-2-carboxylic acid, useful for stapling/stapled with another amino acid residue comprising an olefin group to form a staple through the olefin group
  SITE 3: note = (S)-2-amino-4,4-dimethylpentanoic acid
  VARIANT 4: note = 2-amino-2-(pent-4-en-1-yl)hept-6-enoic acid, useful for stapling/stapled with another amino acid residue comprising an olefin group to form a staple through one of the two olefin groups and/or with another amino acid residue comprising an olefin group to form a staple through the other of the two olefin groups
  SITE 6: note = (S)-3-(2-amino-2-carboxyethyl)benzoic acid
  SITE 7: note = 1-aminocyclopentane-1-carboxylic acid
  SITE 10: note = L-lysine, useful for stapling/stapled with another amino acid residue comprising a side chain acid group to form a staple through the 6-amino group
  SITE 11: note (S)-3-amino-1-((pent-4-en-1-yloxy)carbonyl)pyrrolidine-3-ca rboxylic acid, useful for stapling/stapled with another amino acid residue comprising an olefin group to form a staple through the olefin group
  SITE 12: note = (S)-2-amino-3-(thiophen-3-yl)propanoic acid
  SITE 13: note = (S)-2-amino-3-(benzo[b]thiophen-3-yl)propanoic acid
  SITE 14: note = L-glutamic acid, useful for stapling/stapled with another amino acid residue comprising a side chain amino group to form a staple through the 4-carboxyl group
  SITE 15: note = C-term amino
XDXXDXXSFKXXXEA

SEQ ID NO: 723 - protein, 15 aa, synthetic construct
  SITE 1: note = N-term Acetic Acid
  SITE 1: note = (R)-2-allylpyrrolidine-2-carboxylic acid, useful for stapling/stapled with another amino acid residue comprising an olefin group to form a staple through the olefin group
  SITE 3: note = (S)-2-amino-4,4-dimethylpentanoic acid
  VARIANT 4: note = 2-amino-2-(pent-4-en-1-yl)hept-6-enoic acid, useful for stapling/stapled with another amino acid residue comprising an olefin group to form a staple through one of the two olefin groups and/or with another amino acid residue comprising an olefin group to form a staple through the other of the two olefin groups
  SITE 6: note = (S)-3-(2-amino-2-carboxyethyl)benzoic acid
  SITE 10: note = L-lysine, useful for stapling/stapled with another amino acid residue comprising a side chain acid group to form a staple through the 6-amino group
  SITE 11: note (S)-3-amino-1-((pent-4-en-1-yloxy)carbonyl)pyrrolidine-3-ca rboxylic acid, useful for stapling/stapled with another amino acid residue comprising an olefin group to form a staple through the olefin group
  SITE 12: note = (S)-2-amino-3-(thiophen-3-yl)propanoic acid
  SITE 13: note = (S)-2-amino-3-(benzo[b]thiophen-3-yl)propanoic acid
  SITE 14: note = L-glutamic acid, useful for stapling/stapled with another amino acid residue comprising a side chain amino group to form a staple through the 4-carboxyl group
  SITE 15: note = C-term amino
XDXXDXFSFKXXXEA

SEQ ID NO: 724 - protein, 15 aa, synthetic construct
  SITE 1: note = N-term Acetic Acid
  SITE 1: note = (R)-2-allylpyrrolidine-2-carboxylic acid, useful for stapling/stapled with another amino acid residue comprising an olefin group to form a staple through the olefin group
  SITE 3: note = (S)-2-amino-4,4-dimethylpentanoic acid
  VARIANT 4: note = 2-amino-2-(pent-4-en-1-yl)hept-6-enoic acid, useful for stapling/stapled with another amino acid residue comprising an olefin group to form a staple through one of the two olefin groups and/or with another amino acid residue comprising an olefin group to form a staple through the other of the two olefin groups
  SITE 6: note = (S)-3-(2-amino-2-carboxyethyl)benzoic acid
  SITE 10: note = L-lysine, useful for stapling/stapled with another amino acid residue comprising a side chain acid group to form a staple through the 6-amino group
  SITE 11: note (S)-3-amino-1-((pent-4-en-1-yloxy)carbonyl)pyrrolidine-3-ca rboxylic acid, useful for stapling/stapled with another amino acid residue comprising an olefin group to form a staple through the olefin group
  SITE 12: note = (S)-2-amino-3-(thiophen-3-yl)propanoic acid
  SITE 13: note = (S)-2-amino-3-(benzo[b]thiophen-3-yl)propanoic acid
  SITE 14: note = L-glutamic acid, useful for stapling/stapled with another amino acid residue comprising a side chain amino group to form a staple through the 4-carboxyl group
  SITE 15: note = C-term amino
XDXXDXVSFKXXXEA

SEQ ID NO: 725 - protein, 15 aa, synthetic construct
  SITE 1: note = N-term Acetic Acid
  SITE 1: note = (R)-2-allylpyrrolidine-2-carboxylic acid, useful for stapling/stapled with another amino acid residue comprising an olefin group to form a staple through the olefin group
  SITE 3: note = (S)-2-amino-4,4-dimethylpentanoic acid
  VARIANT 4: note = 2-amino-2-(pent-4-en-1-yl)hept-6-enoic acid, useful for stapling/stapled with another amino acid residue comprising an olefin group to form a staple through one of the two olefin groups and/or with another amino acid residue comprising an olefin group to form a staple through the other of the two olefin groups
  SITE 6: note = (S)-3-(2-amino-2-carboxyethyl)benzoic acid
  SITE 7: note = 1-aminocyclopentane-1-carboxylic acid
  SITE 10: note = L-lysine, useful for stapling/stapled with another amino acid residue comprising a side chain acid group to form a staple through the 6-amino group
  SITE 11: note (S)-3-amino-1-((pent-4-en-1-yloxy)carbonyl)pyrrolidine-3-ca rboxylic acid, useful for stapling/stapled with another amino acid residue comprising an olefin group to form a staple through the olefin group
  SITE 12: note = (S)-2-amino-3-(thiophen-3-yl)propanoic acid
  SITE 13: note = (S)-2-amino-3-(benzo[b]thiophen-3-yl)propanoic acid
  SITE 14: note = L-glutamic acid, useful for stapling/stapled with another amino acid residue comprising a side chain amino group to form a staple through the 4-carboxyl group
  SITE 15: note = C-term amino
XDXXDXXGFKXXXEA

SEQ ID NO: 726 - protein, 15 aa, synthetic construct
  SITE 1: note = N-term Acetic Acid
  SITE 1: note = (R)-2-allylpyrrolidine-2-carboxylic acid, useful for stapling/stapled with another amino acid residue comprising an olefin group to form a staple through the olefin group
  SITE 3: note = (S)-2-amino-4,4-dimethylpentanoic acid
  VARIANT 4: note = 2-amino-2-(pent-4-en-1-yl)hept-6-enoic acid, useful for stapling/stapled with another amino acid residue comprising an olefin group to form a staple through one of the two olefin groups and/or with another amino acid residue comprising an olefin group to form a staple through the other of the two olefin groups
  SITE 6: note = (S)-3-(2-amino-2-carboxyethyl)benzoic acid
  SITE 10: note = L-lysine, useful for stapling/stapled with another amino acid residue comprising a side chain acid group to form a staple through the 6-amino group
  SITE 11: note (S)-3-amino-1-((pent-4-en-1-yloxy)carbonyl)pyrrolidine-3-ca rboxylic acid, useful for stapling/stapled with another amino acid residue comprising an olefin group to form a staple through the olefin group
  SITE 12: note = (S)-2-amino-3-(thiophen-3-yl)propanoic acid
  SITE 13: note = (S)-2-amino-3-(benzo[b]thiophen-3-yl)propanoic acid
  SITE 14: note = L-glutamic acid, useful for stapling/stapled with another amino acid residue comprising a side chain amino group to form a staple through the 4-carboxyl group
  SITE 15: note = C-term amino
XDXXDXFGFKXXXEA

SEQ ID NO: 727 - protein, 15 aa, synthetic construct
  SITE 1: note = N-term Acetic Acid
  SITE 1: note = (R)-2-allylpyrrolidine-2-carboxylic acid, useful for stapling/stapled with another amino acid residue comprising an olefin group to form a staple through the olefin group
  SITE 3: note = (S)-2-amino-4,4-dimethylpentanoic acid
  VARIANT 4: note = 2-amino-2-(pent-4-en-1-yl)hept-6-enoic acid, useful for stapling/stapled with another amino acid residue comprising an olefin group to form a staple through one of the two olefin groups and/or with another amino acid residue comprising an olefin group to form a staple through the other of the two olefin groups
  SITE 6: note = (S)-3-(2-amino-2-carboxyethyl)benzoic acid
  SITE 10: note = L-lysine, useful for stapling/stapled with another amino acid residue comprising a side chain acid group to form a staple through the 6-amino group
  SITE 11: note (S)-3-amino-1-((pent-4-en-1-yloxy)carbonyl)pyrrolidine-3-ca rboxylic acid, useful for stapling/stapled with another amino acid residue comprising an olefin group to form a staple through the olefin group
  SITE 12: note = (S)-2-amino-3-(thiophen-3-yl)propanoic acid
  SITE 13: note = (S)-2-amino-3-(benzo[b]thiophen-3-yl)propanoic acid
  SITE 14: note = L-glutamic acid, useful for stapling/stapled with another amino acid residue comprising a side chain amino group to form a staple through the 4-carboxyl group
  SITE 15: note = C-term amino
XDXXDXVGFKXXXEA

SEQ ID NO: 728 - protein, 15 aa, synthetic construct
  SITE 1: note = N-term Acetic Acid
  SITE 1: note = (R)-2-allylpyrrolidine-2-carboxylic acid, useful for stapling/stapled with another amino acid residue comprising an olefin group to form a staple through the olefin group
  SITE 3: note = (S)-2-amino-4,4-dimethylpentanoic acid
  VARIANT 4: note = 2-amino-2-(pent-4-en-1-yl)hept-6-enoic acid, useful for stapling/stapled with another amino acid residue comprising an olefin group to form a staple through one of the two olefin groups and/or with another amino acid residue comprising an olefin group to form a staple through the other of the two olefin groups
  SITE 6: note = (S)-3-(2-amino-2-carboxyethyl)benzoic acid
  SITE 7: note = 1-aminocyclopentane-1-carboxylic acid
  SITE 8: note = (S)-2-aminohexanoic acid
  SITE 10: note = L-lysine, useful for stapling/stapled with another amino acid residue comprising a side chain acid group to form a staple through the 6-amino group
  SITE 11: note (S)-3-amino-1-((pent-4-en-1-yloxy)carbonyl)pyrrolidine-3-ca rboxylic acid, useful for stapling/stapled with another amino acid residue comprising an olefin group to form a staple through the olefin group
  SITE 12: note = (S)-2-amino-3-(thiophen-3-yl)propanoic acid
  SITE 13: note = (S)-2-amino-3-(benzo[b]thiophen-3-yl)propanoic acid
  SITE 14: note = L-glutamic acid, useful for stapling/stapled with another amino acid residue comprising a side chain amino group to form a staple through the 4-carboxyl group
  SITE 15: note = C-term amino
XDXXDXXXFKXXXEA

SEQ ID NO: 729 - protein, 15 aa, synthetic construct
  SITE 1: note = N-term Acetic Acid
  SITE 1: note = (R)-2-allylpyrrolidine-2-carboxylic acid, useful for stapling/stapled with another amino acid residue comprising an olefin group to form a staple through the olefin group
  SITE 3: note = (S)-2-amino-4,4-dimethylpentanoic acid
  VARIANT 4: note = 2-amino-2-(pent-4-en-1-yl)hept-6-enoic acid, useful for stapling/stapled with another amino acid residue comprising an olefin group to form a staple through one of the two olefin groups and/or with another amino acid residue comprising an olefin group to form a staple through the other of the two olefin groups
  SITE 6: note = (S)-3-(2-amino-2-carboxyethyl)benzoic acid
  SITE 8: note = (S)-2-aminohexanoic acid
  SITE 10: note = L-lysine, useful for stapling/stapled with another amino acid residue comprising a side chain acid group to form a staple through the 6-amino group
  SITE 11: note (S)-3-amino-1-((pent-4-en-1-yloxy)carbonyl)pyrrolidine-3-ca rboxylic acid, useful for stapling/stapled with another amino acid residue comprising an olefin group to form a staple through the olefin group
  SITE 12: note = (S)-2-amino-3-(thiophen-3-yl)propanoic acid
  SITE 13: note = (S)-2-amino-3-(benzo[b]thiophen-3-yl)propanoic acid
  SITE 14: note = L-glutamic acid, useful for stapling/stapled with another amino acid residue comprising a side chain amino group to form a staple through the 4-carboxyl group
  SITE 15: note = C-term amino
XDXXDXFXFKXXXEA

SEQ ID NO: 730 - protein, 15 aa, synthetic construct
  SITE 1: note = N-term Acetic Acid
  SITE 1: note = (R)-2-allylpyrrolidine-2-carboxylic acid, useful for stapling/stapled with another amino acid residue comprising an olefin group to form a staple through the olefin group
  SITE 3: note = (S)-2-amino-4,4-dimethylpentanoic acid
  VARIANT 4: note = 2-amino-2-(pent-4-en-1-yl)hept-6-enoic acid, useful for stapling/stapled with another amino acid residue comprising an olefin group to form a staple through one of the two olefin groups and/or with another amino acid residue comprising an olefin group to form a staple through the other of the two olefin groups
  SITE 6: note = (S)-3-(2-amino-2-carboxyethyl)benzoic acid
  SITE 8: note = (S)-2-aminohexanoic acid
  SITE 10: note = L-lysine, useful for stapling/stapled with another amino acid residue comprising a side chain acid group to form a staple through the 6-amino group
  SITE 11: note (S)-3-amino-1-((pent-4-en-1-yloxy)carbonyl)pyrrolidine-3-ca rboxylic acid, useful for stapling/stapled with another amino acid residue comprising an olefin group to form a staple through the olefin group
  SITE 12: note = (S)-2-amino-3-(thiophen-3-yl)propanoic acid
  SITE 13: note = (S)-2-amino-3-(benzo[b]thiophen-3-yl)propanoic acid
  SITE 14: note = L-glutamic acid, useful for stapling/stapled with another amino acid residue comprising a side chain amino group to form a staple through the 4-carboxyl group
  SITE 15: note = C-term amino
XDXXDXVXFKXXXEA

SEQ ID NO: 731 - protein, 15 aa, synthetic construct
  SITE 1: note = N-term Acetic Acid
  SITE 1: note = (R)-2-allylpyrrolidine-2-carboxylic acid, useful for stapling/stapled with another amino acid residue comprising an olefin group to form a staple through the olefin group
  SITE 3: note = (S)-2-amino-4,4-dimethylpentanoic acid
  VARIANT 4: note = 2-amino-2-(pent-4-en-1-yl)hept-6-enoic acid, useful for stapling/stapled with another amino acid residue comprising an olefin group to form a staple through one of the two olefin groups and/or with another amino acid residue comprising an olefin group to form a staple through the other of the two olefin groups
  SITE 6: note = (S)-3-(2-amino-2-carboxyethyl)benzoic acid
  SITE 7: note = 1-aminocyclopentane-1-carboxylic acid
  SITE 8: note = L-allothreonine
  SITE 10: note = L-lysine, useful for stapling/stapled with another amino acid residue comprising a side chain acid group to form a staple through the 6-amino group
  SITE 11: note (S)-3-amino-1-((pent-4-en-1-yloxy)carbonyl)pyrrolidine-3-ca rboxylic acid, useful for stapling/stapled with another amino acid residue comprising an olefin group to form a staple through the olefin group
  SITE 12: note = (S)-2-amino-3-(thiophen-3-yl)propanoic acid
  SITE 13: note = (S)-2-amino-3-(benzo[b]thiophen-3-yl)propanoic acid
  SITE 14: note = L-glutamic acid, useful for stapling/stapled with another amino acid residue comprising a side chain amino group to form a staple through the 4-carboxyl group
  SITE 15: note = C-term amino
XDXXDXXTFKXXXEA

SEQ ID NO: 732 - protein, 15 aa, synthetic construct
  SITE 1: note = N-term Acetic Acid
  SITE 1: note = (R)-2-allylpyrrolidine-2-carboxylic acid, useful for stapling/stapled with another amino acid residue comprising an olefin group to form a staple through the olefin group
  SITE 3: note = (S)-2-amino-4,4-dimethylpentanoic acid
  VARIANT 4: note = 2-amino-2-(pent-4-en-1-yl)hept-6-enoic acid, useful for stapling/stapled with another amino acid residue comprising an olefin group to form a staple through one of the two olefin groups and/or with another amino acid residue comprising an olefin group to form a staple through the other of the two olefin groups
  SITE 6: note = (S)-3-(2-amino-2-carboxyethyl)benzoic acid
  SITE 8: note = L-allothreonine
  SITE 10: note = L-lysine, useful for stapling/stapled with another amino acid residue comprising a side chain acid group to form a staple through the 6-amino group
  SITE 11: note (S)-3-amino-1-((pent-4-en-1-yloxy)carbonyl)pyrrolidine-3-ca rboxylic acid, useful for stapling/stapled with another amino acid residue comprising an olefin group to form a staple through the olefin group
  SITE 12: note = (S)-2-amino-3-(thiophen-3-yl)propanoic acid
  SITE 13: note = (S)-2-amino-3-(benzo[b]thiophen-3-yl)propanoic acid
  SITE 14: note = L-glutamic acid, useful for stapling/stapled with another amino acid residue comprising a side chain amino group to form a staple through the 4-carboxyl group
  SITE 15: note = C-term amino
XDXXDXVTFKXXXEA

SEQ ID NO: 733 - protein, 15 aa, synthetic construct
  SITE 1: note = N-term hex-5-enoic acid, useful for stapling/stapled with another amino acid residue comprising an olefin group to form a staple through the olefin group
  SITE 1: note = (S)-2-methylpyrrolidine-2-carboxylic acid
  SITE 3: note = (S)-2-amino-2-methylpent-4-enoic acid, useful for stapling/stapled with another amino acid residue comprising an olefin group to form a staple through the olefin group
  SITE 4: note = (R)-2-amino-2-methylhept-6-enoic acid, useful for stapling/stapled with another amino acid residue comprising an olefin group to form a staple through the olefin group
  SITE 6: note = (S)-3-(2-amino-2-carboxyethyl)benzoic acid
  SITE 7: note = 2-amino-2-methylpropanoic acid
  SITE 10: note = L-lysine, useful for stapling/stapled with another amino acid residue comprising a side chain acid group to form a staple through the 6-amino group
  SITE 11: note (S)-3-amino-1-((pent-4-en-1-yloxy)carbonyl)pyrrolidine-3-ca rboxylic acid, useful for stapling/stapled with another amino acid residue comprising an olefin group to form a staple through the olefin group
  SITE 12: note = (S)-2-amino-3-(thiophen-3-yl)propanoic acid
  SITE 13: note = (S)-2-amino-3-(benzo[b]thiophen-3-yl)propanoic acid
  SITE 14: note = L-glutamic acid, useful for stapling/stapled with another amino acid residue comprising a side chain amino group to form a staple through the 4-carboxyl group
  SITE 15: note = C-term amino
XDXXDXXAFKXXXEA

SEQ ID NO: 734 - protein, 15 aa, synthetic construct
  SITE 1: note = N-term Acetic Acid
  SITE 1: note = (R)-2-allylpyrrolidine-2-carboxylic acid, stapled with another amino acid residue comprising an olefin group to form a staple through the olefin group, E olefin in the staple
  SITE 3: note = (S)-2-amino-4,4-dimethylpentanoic acid
  VARIANT 4: note = 2-amino-2-(pent-4-en-1-yl)hept-6-enoic acid, stapled with another amino acid residue comprising an olefin group to form a staple through one of the two olefin groups and with another amino acid residue comprising an olefin group to form a staple through the other of the two olefin groups, S configuration
  SITE 6: note = (S)-3-(2-amino-2-carboxyethyl)benzoic acid
  SITE 7: note = 1-aminocyclopentane-1-carboxylic acid
  SITE 10: note = L-lysine, stapled with another amino acid residue comprising a side chain acid group to form a staple through the 6-amino group
  SITE 11: note (S)-3-amino-1-((pent-4-en-1-yloxy)carbonyl)pyrrolidine-3-ca rboxylic acid, stapled with another amino acid residue comprising an olefin group to form a staple through the olefin group, E olefin in the staple
  SITE 12: note = (S)-2-amino-3-(thiophen-3-yl)propanoic acid
  SITE 13: note = (S)-2-amino-3-(benzo[b]thiophen-3-yl)propanoic acid
  SITE 14: note = L-glutamic acid, stapled with another amino acid residue comprising a side chain amino group to form a staple through the 4-carboxyl group
  SITE 15: note = C-term amino
XDXXDXXAFKXXXEA

SEQ ID NO: 735 - protein, 15 aa, synthetic construct
  SITE 1: note = N-term Acetic Acid
  SITE 1: note = (R)-2-allylpyrrolidine-2-carboxylic acid, stapled with another amino acid residue comprising an olefin group to form a staple through the olefin group, Z olefin in the staple
  SITE 3: note = (S)-2-amino-4,4-dimethylpentanoic acid
  VARIANT 4: note = 2-amino-2-(pent-4-en-1-yl)hept-6-enoic acid, stapled with another amino acid residue comprising an olefin group to form a staple through one of the two olefin groups and with another amino acid residue comprising an olefin group to form a staple through the other of the two olefin groups, R configuration
  SITE 6: note = (S)-3-(2-amino-2-carboxyethyl)benzoic acid
  SITE 7: note = 1-aminocyclopentane-1-carboxylic acid
  SITE 10: note = L-lysine, stapled with another amino acid residue comprising a side chain acid group to form a staple through the 6-amino group
  SITE 11: note (S)-3-amino-1-((pent-4-en-1-yloxy)carbonyl)pyrrolidine-3-ca rboxylic acid, stapled with another amino acid residue comprising an olefin group to form a staple through the olefin group, E olefin in the staple
  SITE 12: note = (S)-2-amino-3-(thiophen-3-yl)propanoic acid
  SITE 13: note = (S)-2-amino-3-(benzo[b]thiophen-3-yl)propanoic acid
  SITE 14: note = L-glutamic acid, stapled with another amino acid residue comprising a side chain amino group to form a staple through the 4-carboxyl group
  SITE 15: note = C-term amino
XDXXDXXAFKXXXEA

SEQ ID NO: 736 - protein, 15 aa, synthetic construct
  SITE 1: note = N-term Acetic Acid
  SITE 1: note = (R)-2-allylpyrrolidine-2-carboxylic acid, stapled with another amino acid residue comprising an olefin group to form a staple through the olefin group, Z olefin in the staple
  SITE 3: note = (S)-2-amino-4,4-dimethylpentanoic acid
  VARIANT 4: note = 2-amino-2-(pent-4-en-1-yl)hept-6-enoic acid, stapled with another amino acid residue comprising an olefin group to form a staple through one of the two olefin groups and with another amino acid residue comprising an olefin group to form a staple through the other of the two olefin groups, S configuration
  SITE 6: note = (S)-3-(2-amino-2-carboxyethyl)benzoic acid
  SITE 7: note = 2-amino-2-methylpropanoic acid
  SITE 9: note = (S)-2-amino-3-(thiophen-3-yl)propanoic acid
  SITE 10: note = L-lysine, stapled with another amino acid residue comprising a side chain acid group to form a staple through the 6-amino group
  SITE 11: note (S)-3-amino-1-((pent-4-en-1-yloxy)carbonyl)pyrrolidine-3-ca rboxylic acid, stapled with another amino acid residue comprising an olefin group to form a staple through the olefin group, E olefin in the staple
  SITE 12: note = (S)-2-amino-3-(thiophen-3-yl)propanoic acid
  SITE 13: note = (S)-2-amino-3-(benzo[b]thiophen-3-yl)propanoic acid
  SITE 14: note = L-glutamic acid, stapled with another amino acid residue comprising a side chain amino group to form a staple through the 4-carboxyl group
  SITE 15: note = C-term amino
XDXXDXXAXKXXXEA

SEQ ID NO: 737 - protein, 14 aa, synthetic construct
  SITE 1: note 2-((((9H-fluoren-9-yl)methoxy)carbonyl)amino)-4-(tert-butox y)-4-oxobutanoic acid
  SITE 2: note = (S)-2-amino-4,4-dimethylpentanoic acid
  SITE 3: note = 2-amino-2-(pent-4-en-1-yl)hept-6-enoic acid
  SITE 4: note = (S)-2-amino-4-(tert-butoxy)-4-oxobutanoic acid
  SITE 5: note (S)-2-amino-3-(4-(tert-butoxycarbonyl)phenyl)propanoic acid
  SITE 6: note = 2-Aminoisobutyric acid
  SITE 9: note = (S)-2-amino-6-(1H-1,2,3-triazol-1-yl)hexanoic acid; stapled with another amino acid residue to form a staple through the 4-position of the triazolyl group
  SITE 10: note (S)-3-amino-1-((pent-4-en-1-yloxy)carbonyl)pyrrolidine-3-ca rboxylic acid
  SITE 11: note = (S)-2-amino-3-(thiophen-3-yl)propanoic acid
  SITE 12: note = (S)-2-amino-3-(benzo[b]thiophen-3-yl)propanoic acid
  SITE 13: note = L-alanine; stapled with another amino acid residue comprising a triazolyl group to form a staple through the terminal methyl group
  SITE 14: note = C-term protide
DXXDXXAFKXXXAA

SEQ ID NO: 738 - protein, 15 aa, synthetic construct
  SITE 1: note = N-term acetic acid
  SITE 1: note = (R)-2-allylpyrrolidine-2-carboxylic acid
  SITE 2: note = (S)-2-amino-4-(tert-butoxy)-4-oxobutanoic acid
  SITE 3: note = (S)-2-amino-4,4-dimethylpentanoic acid
  VARIANT 4: note = 2-amino-2-(pent-4-en-1-yl)hept-6-enoic acid, stapled with another amino acid residue comprising an olefin group to form a staple through one of the two olefin groups and with another amino acid residue comprising an olefin group to form a staple through the other of the two olefin groups, R configuration
  SITE 5: note = (S)-2-amino-4-(tert-butoxy)-4-oxobutanoic acid
  SITE 6: note (S)-2-amino-3-(4-(tert-butoxycarbonyl)phenyl)propanoic acid
  SITE 7: note = 2-Aminoisobutyric acid
  SITE 10: note = (S)-2-amino-6-(1H-1,2,3-triazol-1-yl)hexanoic acid; stapled with another amino acid residue to form a staple through the 4-position of the triazolyl group
  SITE 11: note (S)-3-amino-1-((pent-4-en-1-yloxy)carbonyl)pyrrolidine-3-ca rboxylic acid, stapled with another amino acid residue comprising an olefin group to form a staple through the olefin group, E olefin in the staple
  SITE 12: note = (S)-2-amino-3-(thiophen-3-yl)propanoic acid
  SITE 13: note = (S)-2-amino-3-(benzo[b]thiophen-3-yl)propanoic acid
  SITE 14: note = L-alanine; stapled with another amino acid residue comprising a triazolyl group to form a staple through the terminal methyl group
  SITE 15: note = C-term protide
XDXXDXXAFKXXXAA

SEQ ID NO: 739 - protein, 15 aa, synthetic construct
  SITE 1: note = N-term Acetic Acid
  SITE 1: note = (R)-2-allylpyrrolidine-2-carboxylic acid, stapled with another amino acid residue comprising an olefin group to form a staple through the olefin group, E olefin in the staple
  SITE 3: note = (S)-2-amino-4,4-dimethylpentanoic acid
  VARIANT 4: note = 2-amino-2-(pent-4-en-1-yl)hept-6-enoic acid, stapled with another amino acid residue comprising an olefin group to form a staple through one of the two olefin groups and with another amino acid residue comprising an olefin group to form a staple through the other of the two olefin groups, R configuration
  SITE 6: note = (S)-3-(2-amino-2-carboxyethyl)benzoic acid
  SITE 7: note = 2-amino-2-methylpropanoic acid
  SITE 9: note = (S)-2-amino-3-(thiophen-3-yl)propanoic acid
  SITE 10: note = L-lysine, stapled with another amino acid residue comprising a side chain acid group to form a staple through the 6-amino group
  SITE 11: note (S)-3-amino-1-((pent-4-en-1-yloxy)carbonyl)pyrrolidine-3-ca rboxylic acid, stapled with another amino acid residue comprising an olefin group to form a staple through the olefin group, E olefin in the staple
  SITE 12: note = (S)-2-amino-3-(thiophen-3-yl)propanoic acid
  SITE 13: note = (S)-2-amino-3-(benzo[b]thiophen-3-yl)propanoic acid
  SITE 14: note = L-glutamic acid, stapled with another amino acid residue comprising a side chain amino group to form a staple through the 4-carboxyl group
  SITE 15: note = C-term amino
XDXXDXXAXKXXXEA

SEQ ID NO: 740 - protein, 17 aa, synthetic construct
  SITE 1: note = N-term acetic acid
  SITE 7: note = Cysteine, sulfur bonded to a methyl of N,N'-(1,4-phenylene)diacetamide, stapled with the other Cys through the other methyl of N,N'-(1,4-phenylene)diacetamide
  SITE 17: note = C-term amino
DPAFDACDDAAFVCFWQ

SEQ ID NO: 741 - protein, 14 aa, synthetic construct
  SITE 1: note = N-term acetic acid
  SITE 1: note = (R)-2-allylpyrrolidine-2-carboxylic acid, stapled with another amino acid residue comprising an olefin group to form a staple through the olefin group, Z olefin in the staple
  VARIANT 4: note = 2-amino-2-(pent-4-en-1-yl)hept-6-enoic acid, stapled with another amino acid residue comprising an olefin group to form a staple through one of the two olefin groups and with another amino acid residue comprising an olefin group to form a staple through the other of the two olefin groups, S configuration
  SITE 11: note = (S)-2-amino-2-methyldec-9-enoic acid, stapled with another amino acid residue comprising an olefin group to form a staple through the olefin group
  SITE 14: note = C-term amino
XDAXDDAAFVXFWQ

SEQ ID NO: 742 - protein, 14 aa, synthetic construct
  SITE 1: note = N-term acetic acid
  SITE 1: note = (R)-2-allylpyrrolidine-2-carboxylic acid, stapled with another amino acid residue comprising an olefin group to form a staple through the olefin group, Z olefin in the staple
  SITE 3: note = (S)-2-amino-4,4-dimethylpentanoic acid
  VARIANT 4: note = 2-amino-2-(pent-4-en-1-yl)hept-6-enoic acid, stapled with another amino acid residue comprising an olefin group to form a staple through one of the two olefin groups and with another amino acid residue comprising an olefin group to form a staple through the other of the two olefin groups, S configuration
  SITE 6: note = (S)-3-(2-amino-2-carboxyethyl)benzoic acid
  SITE 11: note (S)-3-amino-1-((pent-4-en-1-yloxy)carbonyl)pyrrolidine-3-ca rboxylic acid, stapled with another amino acid residue comprising an olefin group to form a staple through the olefin group
  SITE 12: note (S)-3-amino-1-((pent-4-en-1-yloxy)carbonyl)pyrrolidine-3-ca rboxylic acid, stapled with another amino acid residue comprising an olefin group to form a staple through the olefin group
  SITE 13: note = L-lysine, useful for stapling/stapled with another amino acid residue comprising a side chain acid group to form a staple through the 6-amino group
  SITE 14: note = C-term amino
XDXXDXAAFLXXXQ

SEQ ID NO: 743 - protein, 15 aa, synthetic construct
  SITE 1: note = N-term Acetic Acid
  SITE 1: note = (R)-2-allylpyrrolidine-2-carboxylic acid, useful for stapling/stapled with another amino acid residue comprising an olefin group to form a staple through the olefin group
  SITE 3: note = (S)-2-amino-4,4-dimethylpentanoic acid
  VARIANT 4: note = 2-amino-2-(pent-4-en-1-yl)hept-6-enoic acid, useful for stapling/stapled with another amino acid residue comprising an olefin group to form a staple through one of the two olefin groups and/or with another amino acid residue comprising an olefin group to form a staple through the other of the two olefin groups
  SITE 6: note = (S)-3-(2-amino-2-carboxyethyl)benzoic acid
  SITE 7: note = 2-amino-2-methylpropanoic acid
  SITE 10: note = L-lysine, useful for stapling/stapled with another amino acid residue comprising a side chain acid group to form a staple through the 6-amino group
  SITE 11: note (S)-3-amino-1-((but-3-en-1-yloxy)carbonyl)pyrrolidine-3-car boxylic acid, useful for stapling/stapled with another amino acid residue comprising an olefin group to form a staple through the olefin group
  SITE 12: note = (S)-2-amino-3-(thiophen-3-yl)propanoic acid
  SITE 13: note = (S)-2-amino-3-(benzo[b]thiophen-3-yl)propanoic acid
  SITE 14: note = L-glutamic acid, useful for stapling/stapled with another amino acid residue comprising a side chain amino group to form a staple through the 4-carboxyl group
  SITE 15: note = C-term amino
XDXXDXXAFKXXXEA

SEQ ID NO: 744 - protein, 14 aa, synthetic construct
  SITE 1: note = N-term Acetic Acid
  SITE 1: note = (R)-2-allylpyrrolidine-2-carboxylic acid, useful for stapling/stapled with another amino acid residue comprising an olefin group to form a staple through the olefin group
  SITE 3: note = (S)-2-amino-4,4-dimethylpentanoic acid
  VARIANT 4: note = 2-amino-2-(pent-4-en-1-yl)hept-6-enoic acid, useful for stapling/stapled with another amino acid residue comprising an olefin group to form a staple through one of the two olefin groups and/or with another amino acid residue comprising an olefin group to form a staple through the other of the two olefin groups
  SITE 6: note = (S)-3-(2-amino-2-carboxyethyl)benzoic acid
  SITE 7: note = 2-amino-2-methylpropanoic acid
  SITE 10: note = L-lysine, useful for stapling/stapled with another amino acid residue comprising a side chain acid group to form a staple through the 6-amino group
  SITE 11: note (S)-3-amino-1-((pent-4-en-1-yloxy)carbonyl)pyrrolidine-3-ca rboxylic acid, useful for stapling/stapled with another amino acid residue comprising an olefin group to form a staple through the olefin group
  SITE 12: note = (S)-2-amino-3-(thiophen-3-yl)propanoic acid
  SITE 13: note = (S)-2-amino-3-(3,4-dichlorophenyl)propanoic acid
  SITE 14: note = L-glutamic acid, useful for stapling/stapled with another amino acid residue comprising a side chain amino group to form a staple through the 4-carboxyl group
  SITE 14: note = C-term amino
XEXXEXXAFKXXXE

SEQ ID NO: 745 - protein, 15 aa, synthetic construct
  SITE 1: note = N-term 4-(pyridin-2-yl)butanoic acid
  SITE 1: note = (R)-2-allylpyrrolidine-2-carboxylic acid, useful for stapling/stapled with another amino acid residue comprising an olefin group to form a staple through the olefin group
  SITE 3: note = (S)-2-amino-4,4-dimethylpentanoic acid
  VARIANT 4: note = 2-amino-2-(pent-4-en-1-yl)hept-6-enoic acid, useful for stapling/stapled with another amino acid residue comprising an olefin group to form a staple through one of the two olefin groups and/or with another amino acid residue comprising an olefin group to form a staple through the other of the two olefin groups
  SITE 6: note = (S)-3-(2-amino-2-carboxyethyl)benzoic acid
  SITE 7: note = 2-amino-2-methylpropanoic acid
  SITE 10: note = L-lysine, useful for stapling/stapled with another amino acid residue comprising a side chain acid group to form a staple through the 6-amino group
  SITE 11: note (S)-3-amino-1-((pent-4-en-1-yloxy)carbonyl)pyrrolidine-3-ca rboxylic acid, useful for stapling/stapled with another amino acid residue comprising an olefin group to form a staple through the olefin group
  SITE 12: note = (S)-2-amino-3-(thiophen-3-yl)propanoic acid
  SITE 13: note = (S)-2-amino-3-(benzo[b]thiophen-3-yl)propanoic acid
  SITE 14: note = L-glutamic acid, useful for stapling/stapled with another amino acid residue comprising a side chain amino group to form a staple through the 4-carboxyl group
  SITE 15: note = C-term amino
XEXXEXXAFKXXXEA

SEQ ID NO: 746 - protein, 15 aa, synthetic construct
  SITE 1: note = N-term Acetic Acid
  SITE 1: note = (R)-2-allylpyrrolidine-2-carboxylic acid, useful for stapling/stapled with another amino acid residue comprising an olefin group to form a staple through the olefin group
  SITE 3: note = (S)-2-amino-4,4-dimethylpentanoic acid
  VARIANT 4: note = 2-amino-2-(pent-4-en-1-yl)hept-6-enoic acid, useful for stapling/stapled with another amino acid residue comprising an olefin group to form a staple through one of the two olefin groups and/or with another amino acid residue comprising an olefin group to form a staple through the other of the two olefin groups
  SITE 6: note = (S)-3-(2-amino-2-carboxyethyl)benzoic acid
  SITE 7: note = 1-acetyl-4-aminopiperidine-4-carboxylic acid
  SITE 10: note = L-lysine, useful for stapling/stapled with another amino acid residue comprising a side chain acid group to form a staple through the 6-amino group
  SITE 11: note (S)-3-amino-1-((pent-4-en-1-yloxy)carbonyl)pyrrolidine-3-ca rboxylic acid, useful for stapling/stapled with another amino acid residue comprising an olefin group to form a staple through the olefin group
  SITE 12: note = (S)-2-amino-3-(thiophen-3-yl)propanoic acid
  SITE 13: note = (S)-2-amino-3-(benzo[b]thiophen-3-yl)propanoic acid
  SITE 14: note = L-glutamic acid, useful for stapling/stapled with another amino acid residue comprising a side chain amino group to form a staple through the 4-carboxyl group
  SITE 15: note = C-term amino
XDXXDXXAFKXXXEA

SEQ ID NO: 747 - protein, 15 aa, synthetic construct
  SITE 1: note = N-term Acetic Acid
  SITE 1: note = (R)-2-allylpyrrolidine-2-carboxylic acid, useful for stapling/stapled with another amino acid residue comprising an olefin group to form a staple through the olefin group
  SITE 3: note = (S)-2-amino-4,4-dimethylpentanoic acid
  VARIANT 4: note = 2-amino-2-(pent-4-en-1-yl)hept-6-enoic acid, useful for stapling/stapled with another amino acid residue comprising an olefin group to form a staple through one of the two olefin groups and/or with another amino acid residue comprising an olefin group to form a staple through the other of the two olefin groups
  SITE 6: note = (S)-3-(2-amino-2-carboxyethyl)benzoic acid
  SITE 7: note = 4-amino-1-benzoylpiperidine-4-carboxylic acid
  SITE 10: note = L-lysine, useful for stapling/stapled with another amino acid residue comprising a side chain acid group to form a staple through the 6-amino group
  SITE 11: note (S)-3-amino-1-((pent-4-en-1-yloxy)carbonyl)pyrrolidine-3-ca rboxylic acid, useful for stapling/stapled with another amino acid residue comprising an olefin group to form a staple through the olefin group
  SITE 12: note = (S)-2-amino-3-(thiophen-3-yl)propanoic acid
  SITE 13: note = (S)-2-amino-3-(benzo[b]thiophen-3-yl)propanoic acid
  SITE 14: note = L-glutamic acid, useful for stapling/stapled with another amino acid residue comprising a side chain amino group to form a staple through the 4-carboxyl group
  SITE 15: note = C-term amino
XDXXDXXAFKXXXEA

SEQ ID NO: 748 - protein, 15 aa, synthetic construct
  SITE 1: note = N-term Acetic Acid
  SITE 1: note = (R)-2-allylpyrrolidine-2-carboxylic acid, useful for stapling/stapled with another amino acid residue comprising an olefin group to form a staple through the olefin group
  SITE 3: note = (S)-2-amino-4,4-dimethylpentanoic acid
  VARIANT 4: note = 2-amino-2-(pent-4-en-1-yl)hept-6-enoic acid, useful for stapling/stapled with another amino acid residue comprising an olefin group to form a staple through one of the two olefin groups and/or with another amino acid residue comprising an olefin group to form a staple through the other of the two olefin groups
  SITE 6: note = (S)-3-(2-amino-2-carboxyethyl)benzoic acid
  SITE 7: note = 4-amino-1-(3-methylbutanoyl)piperidine-4-carboxylic acid
  SITE 10: note = L-lysine, useful for stapling/stapled with another amino acid residue comprising a side chain acid group to form a staple through the 6-amino group
  SITE 11: note (S)-3-amino-1-((pent-4-en-1-yloxy)carbonyl)pyrrolidine-3-ca rboxylic acid, useful for stapling/stapled with another amino acid residue comprising an olefin group to form a staple through the olefin group
  SITE 12: note = (S)-2-amino-3-(thiophen-3-yl)propanoic acid
  SITE 13: note = (S)-2-amino-3-(benzo[b]thiophen-3-yl)propanoic acid
  SITE 14: note = L-glutamic acid, useful for stapling/stapled with another amino acid residue comprising a side chain amino group to form a staple through the 4-carboxyl group
  SITE 15: note = C-term amino
XDXXDXXAFKXXXEA

SEQ ID NO: 749 - protein, 15 aa, synthetic construct
  SITE 1: note = N-term Acetic Acid
  SITE 1: note = (R)-2-allylpyrrolidine-2-carboxylic acid, useful for stapling/stapled with another amino acid residue comprising an olefin group to form a staple through the olefin group
  SITE 3: note = (S)-2-amino-4,4-dimethylpentanoic acid
  VARIANT 4: note = 2-amino-2-(pent-4-en-1-yl)hept-6-enoic acid, useful for stapling/stapled with another amino acid residue comprising an olefin group to form a staple through one of the two olefin groups and/or with another amino acid residue comprising an olefin group to form a staple through the other of the two olefin groups
  SITE 6: note = (S)-3-(2-amino-2-carboxyethyl)benzoic acid
  SITE 7: note = (S)-1-acetyl-3-aminopyrrolidine-3-carboxylic acid
  SITE 10: note = L-lysine, useful for stapling/stapled with another amino acid residue comprising a side chain acid group to form a staple through the 6-amino group
  SITE 11: note (S)-3-amino-1-((pent-4-en-1-yloxy)carbonyl)pyrrolidine-3-ca rboxylic acid, useful for stapling/stapled with another amino acid residue comprising an olefin group to form a staple through the olefin group
  SITE 12: note = (S)-2-amino-3-(thiophen-3-yl)propanoic acid
  SITE 13: note = (S)-2-amino-3-(benzo[b]thiophen-3-yl)propanoic acid
  SITE 14: note = L-glutamic acid, useful for stapling/stapled with another amino acid residue comprising a side chain amino group to form a staple through the 4-carboxyl group
  SITE 15: note = C-term amino
XDXXDXXAFKXXXEA

SEQ ID NO: 750 - protein, 15 aa, synthetic construct
  SITE 1: note = N-term Acetic Acid
  SITE 1: note = (R)-2-allylpyrrolidine-2-carboxylic acid, useful for stapling/stapled with another amino acid residue comprising an olefin group to form a staple through the olefin group
  SITE 3: note = (S)-2-amino-4,4-dimethylpentanoic acid
  VARIANT 4: note = 2-amino-2-(pent-4-en-1-yl)hept-6-enoic acid, useful for stapling/stapled with another amino acid residue comprising an olefin group to form a staple through one of the two olefin groups and/or with another amino acid residue comprising an olefin group to form a staple through the other of the two olefin groups
  SITE 6: note = (S)-3-(2-amino-2-carboxyethyl)benzoic acid
  SITE 7: note = (S)-3-amino-1-benzoylpyrrolidine-3-carboxylic acid
  SITE 10: note = L-lysine, useful for stapling/stapled with another amino acid residue comprising a side chain acid group to form a staple through the 6-amino group
  SITE 11: note (S)-3-amino-1-((pent-4-en-1-yloxy)carbonyl)pyrrolidine-3-ca rboxylic acid, useful for stapling/stapled with another amino acid residue comprising an olefin group to form a staple through the olefin group
  SITE 12: note = (S)-2-amino-3-(thiophen-3-yl)propanoic acid
  SITE 13: note = (S)-2-amino-3-(benzo[b]thiophen-3-yl)propanoic acid
  SITE 14: note = L-glutamic acid, useful for stapling/stapled with another amino acid residue comprising a side chain amino group to form a staple through the 4-carboxyl group
  SITE 15: note = C-term amino
XDXXDXXAFKXXXEA

SEQ ID NO: 751 - protein, 15 aa, synthetic construct
  SITE 1: note = N-term Acetic Acid
  SITE 1: note = (R)-2-allylpyrrolidine-2-carboxylic acid, useful for stapling/stapled with another amino acid residue comprising an olefin group to form a staple through the olefin group
  SITE 3: note = (S)-2-amino-4,4-dimethylpentanoic acid
  VARIANT 4: note = 2-amino-2-(pent-4-en-1-yl)hept-6-enoic acid, useful for stapling/stapled with another amino acid residue comprising an olefin group to form a staple through one of the two olefin groups and/or with another amino acid residue comprising an olefin group to form a staple through the other of the two olefin groups
  SITE 6: note = (S)-3-(2-amino-2-carboxyethyl)benzoic acid
  SITE 7: note (S)-3-amino-1-(3-methylbutanoyl)pyrrolidine-3-carboxylic acid
  SITE 10: note = L-lysine, useful for stapling/stapled with another amino acid residue comprising a side chain acid group to form a staple through the 6-amino group
  SITE 11: note (S)-3-amino-1-((pent-4-en-1-yloxy)carbonyl)pyrrolidine-3-ca rboxylic acid, useful for stapling/stapled with another amino acid residue comprising an olefin group to form a staple through the olefin group
  SITE 12: note = (S)-2-amino-3-(thiophen-3-yl)propanoic acid
  SITE 13: note = (S)-2-amino-3-(benzo[b]thiophen-3-yl)propanoic acid
  SITE 14: note = L-glutamic acid, useful for stapling/stapled with another amino acid residue comprising a side chain amino group to form a staple through the 4-carboxyl group
  SITE 15: note = C-term amino
XDXXDXXAFKXXXEA

SEQ ID NO: 752 - protein, 15 aa, synthetic construct
  SITE 1: note = N-term Acetic Acid
  SITE 1: note = (R)-2-allylpyrrolidine-2-carboxylic acid, useful for stapling/stapled with another amino acid residue comprising an olefin group to form a staple through the olefin group
  SITE 3: note = (S)-2-amino-4,4-dimethylpentanoic acid
  VARIANT 4: note = 2-amino-2-(pent-4-en-1-yl)hept-6-enoic acid, useful for stapling/stapled with another amino acid residue comprising an olefin group to form a staple through one of the two olefin groups and/or with another amino acid residue comprising an olefin group to form a staple through the other of the two olefin groups
  SITE 6: note = (S)-3-(2-amino-2-carboxyethyl)benzoic acid
  SITE 7: note = (R)-1-acetyl-3-aminopyrrolidine-3-carboxylic acid
  SITE 10: note = L-lysine, useful for stapling/stapled with another amino acid residue comprising a side chain acid group to form a staple through the 6-amino group
  SITE 11: note (S)-3-amino-1-((pent-4-en-1-yloxy)carbonyl)pyrrolidine-3-ca rboxylic acid, useful for stapling/stapled with another amino acid residue comprising an olefin group to form a staple through the olefin group
  SITE 12: note = (S)-2-amino-3-(thiophen-3-yl)propanoic acid
  SITE 13: note = (S)-2-amino-3-(benzo[b]thiophen-3-yl)propanoic acid
  SITE 14: note = L-glutamic acid, useful for stapling/stapled with another amino acid residue comprising a side chain amino group to form a staple through the 4-carboxyl group
  SITE 15: note = C-term amino
XDXXDXXAFKXXXEA

SEQ ID NO: 753 - protein, 15 aa, synthetic construct
  SITE 1: note = N-term Acetic Acid
  SITE 1: note = (R)-2-allylpyrrolidine-2-carboxylic acid, useful for stapling/stapled with another amino acid residue comprising an olefin group to form a staple through the olefin group
  SITE 3: note = (S)-2-amino-4,4-dimethylpentanoic acid
  VARIANT 4: note = 2-amino-2-(pent-4-en-1-yl)hept-6-enoic acid, useful for stapling/stapled with another amino acid residue comprising an olefin group to form a staple through one of the two olefin groups and/or with another amino acid residue comprising an olefin group to form a staple through the other of the two olefin groups
  SITE 6: note = (S)-3-(2-amino-2-carboxyethyl)benzoic acid
  SITE 7: note = (R)-3-amino-1-benzoylpyrrolidine-3-carboxylic acid
  SITE 10: note = L-lysine, useful for stapling/stapled with another amino acid residue comprising a side chain acid group to form a staple through the 6-amino group
  SITE 11: note (S)-3-amino-1-((pent-4-en-1-yloxy)carbonyl)pyrrolidine-3-ca rboxylic acid, useful for stapling/stapled with another amino acid residue comprising an olefin group to form a staple through the olefin group
  SITE 12: note = (S)-2-amino-3-(thiophen-3-yl)propanoic acid
  SITE 13: note = (S)-2-amino-3-(benzo[b]thiophen-3-yl)propanoic acid
  SITE 14: note = L-glutamic acid, useful for stapling/stapled with another amino acid residue comprising a side chain amino group to form a staple through the 4-carboxyl group
  SITE 15: note = C-term amino
XDXXDXXAFKXXXEA

SEQ ID NO: 754 - protein, 15 aa, synthetic construct
  SITE 1: note = N-term Acetic Acid
  SITE 1: note = (R)-2-allylpyrrolidine-2-carboxylic acid, useful for stapling/stapled with another amino acid residue comprising an olefin group to form a staple through the olefin group
  SITE 3: note = (S)-2-amino-4,4-dimethylpentanoic acid
  VARIANT 4: note = 2-amino-2-(pent-4-en-1-yl)hept-6-enoic acid, useful for stapling/stapled with another amino acid residue comprising an olefin group to form a staple through one of the two olefin groups and/or with another amino acid residue comprising an olefin group to form a staple through the other of the two olefin groups
  SITE 6: note = (S)-3-(2-amino-2-carboxyethyl)benzoic acid
  SITE 7: note (R)-3-amino-1-(3-methylbutanoyl)pyrrolidine-3-carboxylic acid
  SITE 10: note = L-lysine, useful for stapling/stapled with another amino acid residue comprising a side chain acid group to form a staple through the 6-amino group
  SITE 11: note (S)-3-amino-1-((pent-4-en-1-yloxy)carbonyl)pyrrolidine-3-ca rboxylic acid, useful for stapling/stapled with another amino acid residue comprising an olefin group to form a staple through the olefin group
  SITE 12: note = (S)-2-amino-3-(thiophen-3-yl)propanoic acid
  SITE 13: note = (S)-2-amino-3-(benzo[b]thiophen-3-yl)propanoic acid
  SITE 14: note = L-glutamic acid, useful for stapling/stapled with another amino acid residue comprising a side chain amino group to form a staple through the 4-carboxyl group
  SITE 15: note = C-term amino
XDXXDXXAFKXXXEA

SEQ ID NO: 755 - protein, 14 aa, synthetic construct
  SITE 1: note = N-term Acetic Acid
  SITE 1: note = (R)-2-allylpyrrolidine-2-carboxylic acid, useful for stapling/stapled with another amino acid residue comprising an olefin group to form a staple through the olefin group
  SITE 3: note = (S)-2-amino-2-cyclohexylacetic acid
  VARIANT 4: note = 2-amino-2-(pent-4-en-1-yl)hept-6-enoic acid, useful for stapling/stapled with another amino acid residue comprising an olefin group to form a staple through one of the two olefin groups and/or with another amino acid residue comprising an olefin group to form a staple through the other of the two olefin groups
  SITE 6: note = (S)-3-(2-amino-2-carboxyethyl)benzoic acid
  SITE 7: note = 2-amino-2-methylpropanoic acid
  SITE 10: note = L-lysine, useful for stapling/stapled with another amino acid residue comprising a side chain acid group to form a staple through the 6-amino group
  SITE 11: note (S)-3-amino-1-((pent-4-en-1-yloxy)carbonyl)pyrrolidine-3-ca rboxylic acid, useful for stapling/stapled with another amino acid residue comprising an olefin group to form a staple through the olefin group
  SITE 12: note = (S)-2-amino-3-(thiophen-3-yl)propanoic acid
  SITE 13: note = (S)-2-amino-3-(3,4-dichlorophenyl)propanoic acid
  SITE 14: note = L-glutamic acid, useful for stapling/stapled with another amino acid residue comprising a side chain amino group to form a staple through the 4-carboxyl group
  SITE 14: note = C-term amino
XDXXDXXAFKXXXE

SEQ ID NO: 756 - protein, 14 aa, synthetic construct
  SITE 1: note = N-term Acetic Acid
  SITE 1: note = (R)-2-allylpyrrolidine-2-carboxylic acid, useful for stapling/stapled with another amino acid residue comprising an olefin group to form a staple through the olefin group
  SITE 3: note = (S)-2-amino-3-cyclohexylpropanoic acid
  VARIANT 4: note = 2-amino-2-(pent-4-en-1-yl)hept-6-enoic acid, useful for stapling/stapled with another amino acid residue comprising an olefin group to form a staple through one of the two olefin groups and/or with another amino acid residue comprising an olefin group to form a staple through the other of the two olefin groups
  SITE 6: note = (S)-3-(2-amino-2-carboxyethyl)benzoic acid
  SITE 7: note = 2-amino-2-methylpropanoic acid
  SITE 10: note = L-lysine, useful for stapling/stapled with another amino acid residue comprising a side chain acid group to form a staple through the 6-amino group
  SITE 11: note (S)-3-amino-1-((pent-4-en-1-yloxy)carbonyl)pyrrolidine-3-ca rboxylic acid, useful for stapling/stapled with another amino acid residue comprising an olefin group to form a staple through the olefin group
  SITE 12: note = (S)-2-amino-3-(thiophen-3-yl)propanoic acid
  SITE 13: note = (S)-2-amino-3-(3,4-dichlorophenyl)propanoic acid
  SITE 14: note = L-glutamic acid, useful for stapling/stapled with another amino acid residue comprising a side chain amino group to form a staple through the 4-carboxyl group
  SITE 14: note = C-term amino
XDXXDXXAFKXXXE

SEQ ID NO: 757 - protein, 14 aa, synthetic construct
  SITE 1: note = N-term Acetic Acid
  SITE 1: note = (R)-2-allylpyrrolidine-2-carboxylic acid, useful for stapling/stapled with another amino acid residue comprising an olefin group to form a staple through the olefin group
  VARIANT 4: note = 2-amino-2-(pent-4-en-1-yl)hept-6-enoic acid, useful for stapling/stapled with another amino acid residue comprising an olefin group to form a staple through one of the two olefin groups and/or with another amino acid residue comprising an olefin group to form a staple through the other of the two olefin groups
  SITE 6: note = (S)-3-(2-amino-2-carboxyethyl)benzoic acid
  SITE 7: note = 1-aminocyclopentane-1-carboxylic acid
  SITE 10: note = L-lysine, useful for stapling/stapled with another amino acid residue comprising a side chain acid group to form a staple through the 6-amino group
  SITE 11: note (S)-3-amino-1-((pent-4-en-1-yloxy)carbonyl)pyrrolidine-3-ca rboxylic acid, useful for stapling/stapled with another amino acid residue comprising an olefin group to form a staple through the olefin group
  SITE 12: note = (S)-2-amino-3-(thiophen-3-yl)propanoic acid
  SITE 13: note = (S)-2-amino-3-(3,4-dichlorophenyl)propanoic acid
  SITE 14: note = L-glutamic acid, useful for stapling/stapled with another amino acid residue comprising a side chain amino group to form a staple through the 4-carboxyl group
  SITE 14: note = C-term amino
XDIXDXXAFKXXXE

SEQ ID NO: 758 - protein, 14 aa, synthetic construct
  SITE 1: note = N-term Acetic Acid
  SITE 1: note = (R)-2-allylpyrrolidine-2-carboxylic acid, useful for stapling/stapled with another amino acid residue comprising an olefin group to form a staple through the olefin group
  SITE 3: note = (S)-2-amino-4,4-dimethylpentanoic acid
  VARIANT 4: note = 2-amino-2-(pent-4-en-1-yl)hept-6-enoic acid, useful for stapling/stapled with another amino acid residue comprising an olefin group to form a staple through one of the two olefin groups and/or with another amino acid residue comprising an olefin group to form a staple through the other of the two olefin groups
  SITE 6: note = (S)-3-(2-amino-2-carboxyethyl)benzoic acid
  SITE 7: note = 1-aminocyclopentane-1-carboxylic acid
  SITE 10: note = L-lysine, useful for stapling/stapled with another amino acid residue comprising a side chain acid group to form a staple through the 6-amino group
  SITE 11: note (S)-3-amino-1-((pent-4-en-1-yloxy)carbonyl)pyrrolidine-3-ca rboxylic acid, useful for stapling/stapled with another amino acid residue comprising an olefin group to form a staple through the olefin group
  SITE 12: note = (S)-2-amino-3-(thiophen-3-yl)propanoic acid
  SITE 13: note = (S)-2-amino-3-(3,4-dichlorophenyl)propanoic acid
  SITE 14: note = L-glutamic acid, useful for stapling/stapled with another amino acid residue comprising a side chain amino group to form a staple through the 4-carboxyl group
  SITE 14: note = C-term amino
XDXXDXXAFKXXXE

SEQ ID NO: 759 - protein, 14 aa, synthetic construct
  SITE 1: note = N-term Acetic Acid
  SITE 1: note = (R)-2-allylpyrrolidine-2-carboxylic acid, useful for stapling/stapled with another amino acid residue comprising an olefin group to form a staple through the olefin group
  SITE 3: note = (S)-2-amino-2-cyclohexylacetic acid
  VARIANT 4: note = 2-amino-2-(pent-4-en-1-yl)hept-6-enoic acid, useful for stapling/stapled with another amino acid residue comprising an olefin group to form a staple through one of the two olefin groups and/or with another amino acid residue comprising an olefin group to form a staple through the other of the two olefin groups
  SITE 6: note = (S)-3-(2-amino-2-carboxyethyl)benzoic acid
  SITE 7: note = 1-aminocyclopentane-1-carboxylic acid
  SITE 10: note = L-lysine, useful for stapling/stapled with another amino acid residue comprising a side chain acid group to form a staple through the 6-amino group
  SITE 11: note (S)-3-amino-1-((pent-4-en-1-yloxy)carbonyl)pyrrolidine-3-ca rboxylic acid, useful for stapling/stapled with another amino acid residue comprising an olefin group to form a staple through the olefin group
  SITE 12: note = (S)-2-amino-3-(thiophen-3-yl)propanoic acid
  SITE 13: note = (S)-2-amino-3-(3,4-dichlorophenyl)propanoic acid
  SITE 14: note = L-glutamic acid, useful for stapling/stapled with another amino acid residue comprising a side chain amino group to form a staple through the 4-carboxyl group
  SITE 14: note = C-term amino
XDXXDXXAFKXXXE

SEQ ID NO: 760 - protein, 14 aa, synthetic construct
  SITE 1: note = N-term Acetic Acid
  SITE 1: note = (R)-2-allylpyrrolidine-2-carboxylic acid, useful for stapling/stapled with another amino acid residue comprising an olefin group to form a staple through the olefin group
  SITE 3: note = (S)-2-amino-3-cyclohexylpropanoic acid
  VARIANT 4: note = 2-amino-2-(pent-4-en-1-yl)hept-6-enoic acid, useful for stapling/stapled with another amino acid residue comprising an olefin group to form a staple through one of the two olefin groups and/or with another amino acid residue comprising an olefin group to form a staple through the other of the two olefin groups
  SITE 6: note = (S)-3-(2-amino-2-carboxyethyl)benzoic acid
  SITE 7: note = 1-aminocyclopentane-1-carboxylic acid
  SITE 10: note = L-lysine, useful for stapling/stapled with another amino acid residue comprising a side chain acid group to form a staple through the 6-amino group
  SITE 11: note (S)-3-amino-1-((pent-4-en-1-yloxy)carbonyl)pyrrolidine-3-ca rboxylic acid, useful for stapling/stapled with another amino acid residue comprising an olefin group to form a staple through the olefin group
  SITE 12: note = (S)-2-amino-3-(thiophen-3-yl)propanoic acid
  SITE 13: note = (S)-2-amino-3-(3,4-dichlorophenyl)propanoic acid
  SITE 14: note = L-glutamic acid, useful for stapling/stapled with another amino acid residue comprising a side chain amino group to form a staple through the 4-carboxyl group
  SITE 14: note = C-term amino
XDXXDXXAFKXXXE

SEQ ID NO: 761 - protein, 14 aa, synthetic construct
  SITE 1: note = N-term Acetic Acid
  SITE 1: note = (R)-2-allylpyrrolidine-2-carboxylic acid, useful for stapling/stapled with another amino acid residue comprising an olefin group to form a staple through the olefin group
  SITE 3: note = (S)-2-amino-2-cyclohexylacetic acid
  VARIANT 4: note = 2-amino-2-(pent-4-en-1-yl)hept-6-enoic acid, useful for stapling/stapled with another amino acid residue comprising an olefin group to form a staple through one of the two olefin groups and/or with another amino acid residue comprising an olefin group to form a staple through the other of the two olefin groups
  SITE 6: note = (S)-3-(2-amino-2-carboxyethyl)benzoic acid
  SITE 7: note = 2-amino-2-methylpropanoic acid
  SITE 10: note = L-lysine, useful for stapling/stapled with another amino acid residue comprising a side chain acid group to form a staple through the 6-amino group
  SITE 11: note (S)-3-amino-1-((pent-4-en-1-yloxy)carbonyl)pyrrolidine-3-ca rboxylic acid, useful for stapling/stapled with another amino acid residue comprising an olefin group to form a staple through the olefin group
  SITE 13: note = (S)-2-amino-3-(3,4-dichlorophenyl)propanoic acid
  SITE 14: note = L-glutamic acid, useful for stapling/stapled with another amino acid residue comprising a side chain amino group to form a staple through the 4-carboxyl group
  SITE 14: note = C-term amino
XDXXDXXAFKXFXE

SEQ ID NO: 762 - protein, 14 aa, synthetic construct
  SITE 1: note = N-term Acetic Acid
  SITE 1: note = (R)-2-allylpyrrolidine-2-carboxylic acid, useful for stapling/stapled with another amino acid residue comprising an olefin group to form a staple through the olefin group
  SITE 3: note = (S)-2-amino-3-cyclohexylpropanoic acid
  VARIANT 4: note = 2-amino-2-(pent-4-en-1-yl)hept-6-enoic acid, useful for stapling/stapled with another amino acid residue comprising an olefin group to form a staple through one of the two olefin groups and/or with another amino acid residue comprising an olefin group to form a staple through the other of the two olefin groups
  SITE 6: note = (S)-3-(2-amino-2-carboxyethyl)benzoic acid
  SITE 7: note = 2-amino-2-methylpropanoic acid
  SITE 10: note = L-lysine, useful for stapling/stapled with another amino acid residue comprising a side chain acid group to form a staple through the 6-amino group
  SITE 11: note (S)-3-amino-1-((pent-4-en-1-yloxy)carbonyl)pyrrolidine-3-ca rboxylic acid, useful for stapling/stapled with another amino acid residue comprising an olefin group to form a staple through the olefin group
  SITE 13: note = (S)-2-amino-3-(3,4-dichlorophenyl)propanoic acid
  SITE 14: note = L-glutamic acid, useful for stapling/stapled with another amino acid residue comprising a side chain amino group to form a staple through the 4-carboxyl group
  SITE 14: note = C-term amino
XDXXDXXAFKXFXE

SEQ ID NO: 763 - protein, 14 aa, synthetic construct
  SITE 1: note = N-term Acetic Acid
  SITE 1: note = (R)-2-allylpyrrolidine-2-carboxylic acid, useful for stapling/stapled with another amino acid residue comprising an olefin group to form a staple through the olefin group
  VARIANT 4: note = 2-amino-2-(pent-4-en-1-yl)hept-6-enoic acid, useful for stapling/stapled with another amino acid residue comprising an olefin group to form a staple through one of the two olefin groups and/or with another amino acid residue comprising an olefin group to form a staple through the other of the two olefin groups
  SITE 6: note = (S)-3-(2-amino-2-carboxyethyl)benzoic acid
  SITE 7: note = 1-aminocyclopentane-1-carboxylic acid
  SITE 10: note = L-lysine, useful for stapling/stapled with another amino acid residue comprising a side chain acid group to form a staple through the 6-amino group
  SITE 11: note (S)-3-amino-1-((pent-4-en-1-yloxy)carbonyl)pyrrolidine-3-ca rboxylic acid, useful for stapling/stapled with another amino acid residue comprising an olefin group to form a staple through the olefin group
  SITE 13: note = (S)-2-amino-3-(3,4-dichlorophenyl)propanoic acid
  SITE 14: note = L-glutamic acid, useful for stapling/stapled with another amino acid residue comprising a side chain amino group to form a staple through the 4-carboxyl group
  SITE 14: note = C-term amino
XDIXDXXAFKXFXE

SEQ ID NO: 764 - protein, 14 aa, synthetic construct
  SITE 1: note = N-term Acetic Acid
  SITE 1: note = (R)-2-allylpyrrolidine-2-carboxylic acid, useful for stapling/stapled with another amino acid residue comprising an olefin group to form a staple through the olefin group
  SITE 3: note = (S)-2-amino-4,4-dimethylpentanoic acid
  VARIANT 4: note = 2-amino-2-(pent-4-en-1-yl)hept-6-enoic acid, useful for stapling/stapled with another amino acid residue comprising an olefin group to form a staple through one of the two olefin groups and/or with another amino acid residue comprising an olefin group to form a staple through the other of the two olefin groups
  SITE 6: note = (S)-3-(2-amino-2-carboxyethyl)benzoic acid
  SITE 7: note = 1-aminocyclopentane-1-carboxylic acid
  SITE 10: note = L-lysine, useful for stapling/stapled with another amino acid residue comprising a side chain acid group to form a staple through the 6-amino group
  SITE 11: note (S)-3-amino-1-((pent-4-en-1-yloxy)carbonyl)pyrrolidine-3-ca rboxylic acid, useful for stapling/stapled with another amino acid residue comprising an olefin group to form a staple through the olefin group
  SITE 13: note = (S)-2-amino-3-(3,4-dichlorophenyl)propanoic acid
  SITE 14: note = L-glutamic acid, useful for stapling/stapled with another amino acid residue comprising a side chain amino group to form a staple through the 4-carboxyl group
  SITE 14: note = C-term amino
XDXXDXXAFKXFXE

SEQ ID NO: 765 - protein, 14 aa, synthetic construct
  SITE 1: note = N-term Acetic Acid
  SITE 1: note = (R)-2-allylpyrrolidine-2-carboxylic acid, useful for stapling/stapled with another amino acid residue comprising an olefin group to form a staple through the olefin group
  SITE 3: note = (S)-2-amino-2-cyclohexylacetic acid
  VARIANT 4: note = 2-amino-2-(pent-4-en-1-yl)hept-6-enoic acid, useful for stapling/stapled with another amino acid residue comprising an olefin group to form a staple through one of the two olefin groups and/or with another amino acid residue comprising an olefin group to form a staple through the other of the two olefin groups
  SITE 6: note = (S)-3-(2-amino-2-carboxyethyl)benzoic acid
  SITE 7: note = 1-aminocyclopentane-1-carboxylic acid
  SITE 10: note = L-lysine, useful for stapling/stapled with another amino acid residue comprising a side chain acid group to form a staple through the 6-amino group
  SITE 11: note (S)-3-amino-1-((pent-4-en-1-yloxy)carbonyl)pyrrolidine-3-ca rboxylic acid, useful for stapling/stapled with another amino acid residue comprising an olefin group to form a staple through the olefin group
  SITE 13: note = (S)-2-amino-3-(3,4-dichlorophenyl)propanoic acid
  SITE 14: note = L-glutamic acid, useful for stapling/stapled with another amino acid residue comprising a side chain amino group to form a staple through the 4-carboxyl group
  SITE 14: note = C-term amino
XDXXDXXAFKXFXE

SEQ ID NO: 766 - protein, 14 aa, synthetic construct
  SITE 1: note = N-term Acetic Acid
  SITE 1: note = (R)-2-allylpyrrolidine-2-carboxylic acid, useful for stapling/stapled with another amino acid residue comprising an olefin group to form a staple through the olefin group
  SITE 3: note = (S)-2-amino-3-cyclohexylpropanoic acid
  VARIANT 4: note = 2-amino-2-(pent-4-en-1-yl)hept-6-enoic acid, useful for stapling/stapled with another amino acid residue comprising an olefin group to form a staple through one of the two olefin groups and/or with another amino acid residue comprising an olefin group to form a staple through the other of the two olefin groups
  SITE 6: note = (S)-3-(2-amino-2-carboxyethyl)benzoic acid
  SITE 7: note = 1-aminocyclopentane-1-carboxylic acid
  SITE 10: note = L-lysine, useful for stapling/stapled with another amino acid residue comprising a side chain acid group to form a staple through the 6-amino group
  SITE 11: note (S)-3-amino-1-((pent-4-en-1-yloxy)carbonyl)pyrrolidine-3-ca rboxylic acid, useful for stapling/stapled with another amino acid residue comprising an olefin group to form a staple through the olefin group
  SITE 13: note = (S)-2-amino-3-(3,4-dichlorophenyl)propanoic acid
  SITE 14: note = L-glutamic acid, useful for stapling/stapled with another amino acid residue comprising a side chain amino group to form a staple through the 4-carboxyl group
  SITE 14: note = C-term amino
XDXXDXXAFKXFXE

SEQ ID NO: 767 - protein, 14 aa, synthetic construct
  SITE 1: note = N-term Acetic Acid
  SITE 1: note = (R)-2-allylpyrrolidine-2-carboxylic acid, useful for stapling/stapled with another amino acid residue comprising an olefin group to form a staple through the olefin group
  SITE 3: note = (S)-2-amino-4,4-dimethylpentanoic acid
  VARIANT 4: note = 2-amino-2-(pent-4-en-1-yl)hept-6-enoic acid, useful for stapling/stapled with another amino acid residue comprising an olefin group to form a staple through one of the two olefin groups and/or with another amino acid residue comprising an olefin group to form a staple through the other of the two olefin groups
  SITE 6: note = (2S,3S)-2-amino-3-methylsuccinic acid
  SITE 7: note = 2-amino-2-methylpropanoic acid
  SITE 10: note = L-lysine, useful for stapling/stapled with another amino acid residue comprising a side chain acid group to form a staple through the 6-amino group
  SITE 11: note (S)-3-amino-1-((pent-4-en-1-yloxy)carbonyl)pyrrolidine-3-ca rboxylic acid, useful for stapling/stapled with another amino acid residue comprising an olefin group to form a staple through the olefin group
  SITE 13: note = (S)-2-amino-3-(3,4-dichlorophenyl)propanoic acid
  SITE 14: note = L-glutamic acid, useful for stapling/stapled with another amino acid residue comprising a side chain amino group to form a staple through the 4-carboxyl group
  SITE 14: note = C-term amino
XDXXDXXAFKXFXE

SEQ ID NO: 768 - protein, 14 aa, synthetic construct
  SITE 1: note = N-term Acetic Acid
  SITE 1: note = (R)-2-allylpyrrolidine-2-carboxylic acid, useful for stapling/stapled with another amino acid residue comprising an olefin group to form a staple through the olefin group
  SITE 3: note = (S)-2-amino-4,4-dimethylpentanoic acid
  VARIANT 4: note = 2-amino-2-(pent-4-en-1-yl)hept-6-enoic acid, useful for stapling/stapled with another amino acid residue comprising an olefin group to form a staple through one of the two olefin groups and/or with another amino acid residue comprising an olefin group to form a staple through the other of the two olefin groups
  SITE 6: note = (S)-3-amino-2,2-dimethylsuccinic acid
  SITE 7: note = 2-amino-2-methylpropanoic acid
  SITE 10: note = L-lysine, useful for stapling/stapled with another amino acid residue comprising a side chain acid group to form a staple through the 6-amino group
  SITE 11: note (S)-3-amino-1-((pent-4-en-1-yloxy)carbonyl)pyrrolidine-3-ca rboxylic acid, useful for stapling/stapled with another amino acid residue comprising an olefin group to form a staple through the olefin group
  SITE 13: note = (S)-2-amino-3-(3,4-dichlorophenyl)propanoic acid
  SITE 14: note = L-glutamic acid, useful for stapling/stapled with another amino acid residue comprising a side chain amino group to form a staple through the 4-carboxyl group
  SITE 14: note = C-term amino
XDXXDXXAFKXFXE

SEQ ID NO: 769 - protein, 15 aa, synthetic construct
  SITE 1: note = N-term 2-(1H-imidazol-1-yl)acetic acid
  SITE 1: note = (R)-2-allylpyrrolidine-2-carboxylic acid, useful for stapling/stapled with another amino acid residue comprising an olefin group to form a staple through the olefin group
  SITE 3: note = (S)-2-amino-4,4-dimethylpentanoic acid
  VARIANT 4: note = 2-amino-2-(pent-4-en-1-yl)hept-6-enoic acid, useful for stapling/stapled with another amino acid residue comprising an olefin group to form a staple through one of the two olefin groups and/or with another amino acid residue comprising an olefin group to form a staple through the other of the two olefin groups
  SITE 6: note = (S)-3-(2-amino-2-carboxyethyl)benzoic acid
  SITE 7: note = 2-amino-2-methylpropanoic acid
  SITE 10: note = L-lysine, useful for stapling/stapled with another amino acid residue comprising a side chain acid group to form a staple through the 6-amino group
  SITE 11: note (S)-3-amino-1-((pent-4-en-1-yloxy)carbonyl)pyrrolidine-3-ca rboxylic acid, useful for stapling/stapled with another amino acid residue comprising an olefin group to form a staple through the olefin group
  SITE 12: note = (S)-2-amino-3-(thiophen-3-yl)propanoic acid
  SITE 13: note = (S)-2-amino-3-(benzo[b]thiophen-3-yl)propanoic acid
  SITE 14: note = L-glutamic acid, useful for stapling/stapled with another amino acid residue comprising a side chain amino group to form a staple through the 4-carboxyl group
  SITE 15: note = C-term amino
XDXXDXXAFKXXXEA

SEQ ID NO: 770 - protein, 15 aa, synthetic construct
  SITE 1: note = N-term 2,2-difluoro-2-(pyridin-2-yl)acetic acid
  SITE 1: note = (R)-2-allylpyrrolidine-2-carboxylic acid, useful for stapling/stapled with another amino acid residue comprising an olefin group to form a staple through the olefin group
  SITE 3: note = (S)-2-amino-4,4-dimethylpentanoic acid
  VARIANT 4: note = 2-amino-2-(pent-4-en-1-yl)hept-6-enoic acid, useful for stapling/stapled with another amino acid residue comprising an olefin group to form a staple through one of the two olefin groups and/or with another amino acid residue comprising an olefin group to form a staple through the other of the two olefin groups
  SITE 6: note = (S)-3-(2-amino-2-carboxyethyl)benzoic acid
  SITE 7: note = 2-amino-2-methylpropanoic acid
  SITE 10: note = L-lysine, useful for stapling/stapled with another amino acid residue comprising a side chain acid group to form a staple through the 6-amino group
  SITE 11: note (S)-3-amino-1-((pent-4-en-1-yloxy)carbonyl)pyrrolidine-3-ca rboxylic acid, useful for stapling/stapled with another amino acid residue comprising an olefin group to form a staple through the olefin group
  SITE 12: note = (S)-2-amino-3-(thiophen-3-yl)propanoic acid
  SITE 13: note = (S)-2-amino-3-(benzo[b]thiophen-3-yl)propanoic acid
  SITE 14: note = L-glutamic acid, useful for stapling/stapled with another amino acid residue comprising a side chain amino group to form a staple through the 4-carboxyl group
  SITE 15: note = C-term amino
XDXXDXXAFKXXXEA

SEQ ID NO: 771 - protein, 15 aa, synthetic construct
  SITE 1: note = N-term 2-(imidazo[1,2-a]pyridin-2-yl)acetic acid
  SITE 1: note = (R)-2-allylpyrrolidine-2-carboxylic acid, useful for stapling/stapled with another amino acid residue comprising an olefin group to form a staple through the olefin group
  SITE 3: note = (S)-2-amino-4,4-dimethylpentanoic acid
  VARIANT 4: note = 2-amino-2-(pent-4-en-1-yl)hept-6-enoic acid, useful for stapling/stapled with another amino acid residue comprising an olefin group to form a staple through one of the two olefin groups and/or with another amino acid residue comprising an olefin group to form a staple through the other of the two olefin groups
  SITE 6: note = (S)-3-(2-amino-2-carboxyethyl)benzoic acid
  SITE 7: note = 2-amino-2-methylpropanoic acid
  SITE 10: note = L-lysine, useful for stapling/stapled with another amino acid residue comprising a side chain acid group to form a staple through the 6-amino group
  SITE 11: note (S)-3-amino-1-((pent-4-en-1-yloxy)carbonyl)pyrrolidine-3-ca rboxylic acid, useful for stapling/stapled with another amino acid residue comprising an olefin group to form a staple through the olefin group
  SITE 12: note = (S)-2-amino-3-(thiophen-3-yl)propanoic acid
  SITE 13: note = (S)-2-amino-3-(benzo[b]thiophen-3-yl)propanoic acid
  SITE 14: note = L-glutamic acid, useful for stapling/stapled with another amino acid residue comprising a side chain amino group to form a staple through the 4-carboxyl group
  SITE 15: note = C-term amino
XDXXDXXAFKXXXEA

SEQ ID NO: 772 - protein, 15 aa, synthetic construct
  SITE 1: note = N-term 3-(1H-1,2,4-triazol-1-yl)propanoic acid
  SITE 1: note = (R)-2-allylpyrrolidine-2-carboxylic acid, useful for stapling/stapled with another amino acid residue comprising an olefin group to form a staple through the olefin group
  SITE 3: note = (S)-2-amino-4,4-dimethylpentanoic acid
  VARIANT 4: note = 2-amino-2-(pent-4-en-1-yl)hept-6-enoic acid, useful for stapling/stapled with another amino acid residue comprising an olefin group to form a staple through one of the two olefin groups and/or with another amino acid residue comprising an olefin group to form a staple through the other of the two olefin groups
  SITE 6: note = (S)-3-(2-amino-2-carboxyethyl)benzoic acid
  SITE 7: note = 2-amino-2-methylpropanoic acid
  SITE 10: note = L-lysine, useful for stapling/stapled with another amino acid residue comprising a side chain acid group to form a staple through the 6-amino group
  SITE 11: note (S)-3-amino-1-((pent-4-en-1-yloxy)carbonyl)pyrrolidine-3-ca rboxylic acid, useful for stapling/stapled with another amino acid residue comprising an olefin group to form a staple through the olefin group
  SITE 12: note = (S)-2-amino-3-(thiophen-3-yl)propanoic acid
  SITE 13: note = (S)-2-amino-3-(benzo[b]thiophen-3-yl)propanoic acid
  SITE 14: note = L-glutamic acid, useful for stapling/stapled with another amino acid residue comprising a side chain amino group to form a staple through the 4-carboxyl group
  SITE 15: note = C-term amino
XDXXDXXAFKXXXEA

SEQ ID NO: 773 - protein, 15 aa, synthetic construct
  SITE 1: note = N-term 2-(quinolin-6-yl)acetic acid
  SITE 1: note = (R)-2-allylpyrrolidine-2-carboxylic acid, useful for stapling/stapled with another amino acid residue comprising an olefin group to form a staple through the olefin group
  SITE 3: note = (S)-2-amino-4,4-dimethylpentanoic acid
  VARIANT 4: note = 2-amino-2-(pent-4-en-1-yl)hept-6-enoic acid, useful for stapling/stapled with another amino acid residue comprising an olefin group to form a staple through one of the two olefin groups and/or with another amino acid residue comprising an olefin group to form a staple through the other of the two olefin groups
  SITE 6: note = (S)-3-(2-amino-2-carboxyethyl)benzoic acid
  SITE 7: note = 2-amino-2-methylpropanoic acid
  SITE 10: note = L-lysine, useful for stapling/stapled with another amino acid residue comprising a side chain acid group to form a staple through the 6-amino group
  SITE 11: note (S)-3-amino-1-((pent-4-en-1-yloxy)carbonyl)pyrrolidine-3-ca rboxylic acid, useful for stapling/stapled with another amino acid residue comprising an olefin group to form a staple through the olefin group
  SITE 12: note = (S)-2-amino-3-(thiophen-3-yl)propanoic acid
  SITE 13: note = (S)-2-amino-3-(benzo[b]thiophen-3-yl)propanoic acid
  SITE 14: note = L-glutamic acid, useful for stapling/stapled with another amino acid residue comprising a side chain amino group to form a staple through the 4-carboxyl group
  SITE 15: note = C-term amino
XDXXDXXAFKXXXEA

SEQ ID NO: 774 - protein, 15 aa, synthetic construct
  SITE 1: note = N-term 2-(pyridin-3-yl)acetic acid
  SITE 1: note = (R)-2-allylpyrrolidine-2-carboxylic acid, useful for stapling/stapled with another amino acid residue comprising an olefin group to form a staple through the olefin group
  SITE 3: note = (S)-2-amino-4,4-dimethylpentanoic acid
  VARIANT 4: note = 2-amino-2-(pent-4-en-1-yl)hept-6-enoic acid, useful for stapling/stapled with another amino acid residue comprising an olefin group to form a staple through one of the two olefin groups and/or with another amino acid residue comprising an olefin group to form a staple through the other of the two olefin groups
  SITE 6: note = (S)-3-(2-amino-2-carboxyethyl)benzoic acid
  SITE 7: note = 2-amino-2-methylpropanoic acid
  SITE 10: note = L-lysine, useful for stapling/stapled with another amino acid residue comprising a side chain acid group to form a staple through the 6-amino group
  SITE 11: note (S)-3-amino-1-((pent-4-en-1-yloxy)carbonyl)pyrrolidine-3-ca rboxylic acid, useful for stapling/stapled with another amino acid residue comprising an olefin group to form a staple through the olefin group
  SITE 12: note = (S)-2-amino-3-(thiophen-3-yl)propanoic acid
  SITE 13: note = (S)-2-amino-3-(benzo[b]thiophen-3-yl)propanoic acid
  SITE 14: note = L-glutamic acid, useful for stapling/stapled with another amino acid residue comprising a side chain amino group to form a staple through the 4-carboxyl group
  SITE 15: note = C-term amino
XDXXDXXAFKXXXEA

SEQ ID NO: 775 - protein, 15 aa, synthetic construct
  SITE 1: note = N-term 2-(1H-1,2,3-triazol-1-yl)acetic acid
  SITE 1: note = (R)-2-allylpyrrolidine-2-carboxylic acid, useful for stapling/stapled with another amino acid residue comprising an olefin group to form a staple through the olefin group
  SITE 3: note = (S)-2-amino-4,4-dimethylpentanoic acid
  VARIANT 4: note = 2-amino-2-(pent-4-en-1-yl)hept-6-enoic acid, useful for stapling/stapled with another amino acid residue comprising an olefin group to form a staple through one of the two olefin groups and/or with another amino acid residue comprising an olefin group to form a staple through the other of the two olefin groups
  SITE 6: note = (S)-3-(2-amino-2-carboxyethyl)benzoic acid
  SITE 7: note = 2-amino-2-methylpropanoic acid
  SITE 10: note = L-lysine, useful for stapling/stapled with another amino acid residue comprising a side chain acid group to form a staple through the 6-amino group
  SITE 11: note (S)-3-amino-1-((pent-4-en-1-yloxy)carbonyl)pyrrolidine-3-ca rboxylic acid, useful for stapling/stapled with another amino acid residue comprising an olefin group to form a staple through the olefin group
  SITE 12: note = (S)-2-amino-3-(thiophen-3-yl)propanoic acid
  SITE 13: note = (S)-2-amino-3-(benzo[b]thiophen-3-yl)propanoic acid
  SITE 14: note = L-glutamic acid, useful for stapling/stapled with another amino acid residue comprising a side chain amino group to form a staple through the 4-carboxyl group
  SITE 15: note = C-term amino
XDXXDXXAFKXXXEA

SEQ ID NO: 776 - protein, 15 aa, synthetic construct
  SITE 1: note = N-term 2-(1H-pyrazol-1-yl)acetic acid
  SITE 1: note = (R)-2-allylpyrrolidine-2-carboxylic acid, useful for stapling/stapled with another amino acid residue comprising an olefin group to form a staple through the olefin group
  SITE 3: note = (S)-2-amino-4,4-dimethylpentanoic acid
  VARIANT 4: note = 2-amino-2-(pent-4-en-1-yl)hept-6-enoic acid, useful for stapling/stapled with another amino acid residue comprising an olefin group to form a staple through one of the two olefin groups and/or with another amino acid residue comprising an olefin group to form a staple through the other of the two olefin groups
  SITE 6: note = (S)-3-(2-amino-2-carboxyethyl)benzoic acid
  SITE 7: note = 2-amino-2-methylpropanoic acid
  SITE 10: note = L-lysine, useful for stapling/stapled with another amino acid residue comprising a side chain acid group to form a staple through the 6-amino group
  SITE 11: note (S)-3-amino-1-((pent-4-en-1-yloxy)carbonyl)pyrrolidine-3-ca rboxylic acid, useful for stapling/stapled with another amino acid residue comprising an olefin group to form a staple through the olefin group
  SITE 12: note = (S)-2-amino-3-(thiophen-3-yl)propanoic acid
  SITE 13: note = (S)-2-amino-3-(benzo[b]thiophen-3-yl)propanoic acid
  SITE 14: note = L-glutamic acid, useful for stapling/stapled with another amino acid residue comprising a side chain amino group to form a staple through the 4-carboxyl group
  SITE 15: note = C-term amino
XDXXDXXAFKXXXEA

SEQ ID NO: 777 - protein, 15 aa, synthetic construct
  SITE 1: note = N-term 3-(pyridin-4-yl)propanoic acid
  SITE 1: note = (R)-2-allylpyrrolidine-2-carboxylic acid, useful for stapling/stapled with another amino acid residue comprising an olefin group to form a staple through the olefin group
  SITE 3: note = (S)-2-amino-4,4-dimethylpentanoic acid
  VARIANT 4: note = 2-amino-2-(pent-4-en-1-yl)hept-6-enoic acid, useful for stapling/stapled with another amino acid residue comprising an olefin group to form a staple through one of the two olefin groups and/or with another amino acid residue comprising an olefin group to form a staple through the other of the two olefin groups
  SITE 6: note = (S)-3-(2-amino-2-carboxyethyl)benzoic acid
  SITE 7: note = 2-amino-2-methylpropanoic acid
  SITE 10: note = L-lysine, useful for stapling/stapled with another amino acid residue comprising a side chain acid group to form a staple through the 6-amino group
  SITE 11: note (S)-3-amino-1-((pent-4-en-1-yloxy)carbonyl)pyrrolidine-3-ca rboxylic acid, useful for stapling/stapled with another amino acid residue comprising an olefin group to form a staple through the olefin group
  SITE 12: note = (S)-2-amino-3-(thiophen-3-yl)propanoic acid
  SITE 13: note = (S)-2-amino-3-(benzo[b]thiophen-3-yl)propanoic acid
  SITE 14: note = L-glutamic acid, useful for stapling/stapled with another amino acid residue comprising a side chain amino group to form a staple through the 4-carboxyl group
  SITE 15: note = C-term amino
XDXXDXXAFKXXXEA

SEQ ID NO: 778 - protein, 15 aa, synthetic construct
  SITE 1: note = N-term 3-(pyridin-3-yl)propanoic acid
  SITE 1: note = (R)-2-allylpyrrolidine-2-carboxylic acid, useful for stapling/stapled with another amino acid residue comprising an olefin group to form a staple through the olefin group
  SITE 3: note = (S)-2-amino-4,4-dimethylpentanoic acid
  VARIANT 4: note = 2-amino-2-(pent-4-en-1-yl)hept-6-enoic acid, useful for stapling/stapled with another amino acid residue comprising an olefin group to form a staple through one of the two olefin groups and/or with another amino acid residue comprising an olefin group to form a staple through the other of the two olefin groups
  SITE 6: note = (S)-3-(2-amino-2-carboxyethyl)benzoic acid
  SITE 7: note = 2-amino-2-methylpropanoic acid
  SITE 10: note = L-lysine, useful for stapling/stapled with another amino acid residue comprising a side chain acid group to form a staple through the 6-amino group
  SITE 11: note (S)-3-amino-1-((pent-4-en-1-yloxy)carbonyl)pyrrolidine-3-ca rboxylic acid, useful for stapling/stapled with another amino acid residue comprising an olefin group to form a staple through the olefin group
  SITE 12: note = (S)-2-amino-3-(thiophen-3-yl)propanoic acid
  SITE 13: note = (S)-2-amino-3-(benzo[b]thiophen-3-yl)propanoic acid
  SITE 14: note = L-glutamic acid, useful for stapling/stapled with another amino acid residue comprising a side chain amino group to form a staple through the 4-carboxyl group
  SITE 15: note = C-term amino
XDXXDXXAFKXXXEA

SEQ ID NO: 779 - protein, 15 aa, synthetic construct
  SITE 1: note = N-term 2-(pyrimidin-5-yl)acetic acid
  SITE 1: note = (R)-2-allylpyrrolidine-2-carboxylic acid, useful for stapling/stapled with another amino acid residue comprising an olefin group to form a staple through the olefin group
  SITE 3: note = (S)-2-amino-4,4-dimethylpentanoic acid
  VARIANT 4: note = 2-amino-2-(pent-4-en-1-yl)hept-6-enoic acid, useful for stapling/stapled with another amino acid residue comprising an olefin group to form a staple through one of the two olefin groups and/or with another amino acid residue comprising an olefin group to form a staple through the other of the two olefin groups
  SITE 6: note = (S)-3-(2-amino-2-carboxyethyl)benzoic acid
  SITE 7: note = 2-amino-2-methylpropanoic acid
  SITE 10: note = L-lysine, useful for stapling/stapled with another amino acid residue comprising a side chain acid group to form a staple through the 6-amino group
  SITE 11: note (S)-3-amino-1-((pent-4-en-1-yloxy)carbonyl)pyrrolidine-3-ca rboxylic acid, useful for stapling/stapled with another amino acid residue comprising an olefin group to form a staple through the olefin group
  SITE 12: note = (S)-2-amino-3-(thiophen-3-yl)propanoic acid
  SITE 13: note = (S)-2-amino-3-(benzo[b]thiophen-3-yl)propanoic acid
  SITE 14: note = L-glutamic acid, useful for stapling/stapled with another amino acid residue comprising a side chain amino group to form a staple through the 4-carboxyl group
  SITE 15: note = C-term amino
XDXXDXXAFKXXXEA

SEQ ID NO: 780 - protein, 15 aa, synthetic construct
  SITE 1: note = N-term 2-(2-oxopyrrolidin-1-yl)acetic acid
  SITE 1: note = (R)-2-allylpyrrolidine-2-carboxylic acid, useful for stapling/stapled with another amino acid residue comprising an olefin group to form a staple through the olefin group
  SITE 3: note = (S)-2-amino-4,4-dimethylpentanoic acid
  VARIANT 4: note = 2-amino-2-(pent-4-en-1-yl)hept-6-enoic acid, useful for stapling/stapled with another amino acid residue comprising an olefin group to form a staple through one of the two olefin groups and/or with another amino acid residue comprising an olefin group to form a staple through the other of the two olefin groups
  SITE 6: note = (S)-3-(2-amino-2-carboxyethyl)benzoic acid
  SITE 7: note = 2-amino-2-methylpropanoic acid
  SITE 10: note = L-lysine, useful for stapling/stapled with another amino acid residue comprising a side chain acid group to form a staple through the 6-amino group
  SITE 11: note (S)-3-amino-1-((pent-4-en-1-yloxy)carbonyl)pyrrolidine-3-ca rboxylic acid, useful for stapling/stapled with another amino acid residue comprising an olefin group to form a staple through the olefin group
  SITE 12: note = (S)-2-amino-3-(thiophen-3-yl)propanoic acid
  SITE 13: note = (S)-2-amino-3-(benzo[b]thiophen-3-yl)propanoic acid
  SITE 14: note = L-glutamic acid, useful for stapling/stapled with another amino acid residue comprising a side chain amino group to form a staple through the 4-carboxyl group
  SITE 15: note = C-term amino
XDXXDXXAFKXXXEA

SEQ ID NO: 781 - protein, 15 aa, synthetic construct
  SITE 1: note = N-term 2-(1H-1,2,4-triazol-1-yl)acetic acid
  SITE 1: note = (R)-2-allylpyrrolidine-2-carboxylic acid, useful for stapling/stapled with another amino acid residue comprising an olefin group to form a staple through the olefin group
  SITE 3: note = (S)-2-amino-4,4-dimethylpentanoic acid
  VARIANT 4: note = 2-amino-2-(pent-4-en-1-yl)hept-6-enoic acid, useful for stapling/stapled with another amino acid residue comprising an olefin group to form a staple through one of the two olefin groups and/or with another amino acid residue comprising an olefin group to form a staple through the other of the two olefin groups
  SITE 6: note = (S)-3-(2-amino-2-carboxyethyl)benzoic acid
  SITE 7: note = 2-amino-2-methylpropanoic acid
  SITE 10: note = L-lysine, useful for stapling/stapled with another amino acid residue comprising a side chain acid group to form a staple through the 6-amino group
  SITE 11: note (S)-3-amino-1-((pent-4-en-1-yloxy)carbonyl)pyrrolidine-3-ca rboxylic acid, useful for stapling/stapled with another amino acid residue comprising an olefin group to form a staple through the olefin group
  SITE 12: note = (S)-2-amino-3-(thiophen-3-yl)propanoic acid
  SITE 13: note = (S)-2-amino-3-(benzo[b]thiophen-3-yl)propanoic acid
  SITE 14: note = L-glutamic acid, useful for stapling/stapled with another amino acid residue comprising a side chain amino group to form a staple through the 4-carboxyl group
  SITE 15: note = C-term amino
XDXXDXXAFKXXXEA

SEQ ID NO: 782 - protein, 15 aa, synthetic construct
  SITE 1: note = N-term 2-(imidazo[1,2-a]pyridin-3-yl)acetic acid
  SITE 1: note = (R)-2-allylpyrrolidine-2-carboxylic acid, useful for stapling/stapled with another amino acid residue comprising an olefin group to form a staple through the olefin group
  SITE 3: note = (S)-2-amino-4,4-dimethylpentanoic acid
  VARIANT 4: note = 2-amino-2-(pent-4-en-1-yl)hept-6-enoic acid, useful for stapling/stapled with another amino acid residue comprising an olefin group to form a staple through one of the two olefin groups and/or with another amino acid residue comprising an olefin group to form a staple through the other of the two olefin groups
  SITE 6: note = (S)-3-(2-amino-2-carboxyethyl)benzoic acid
  SITE 7: note = 2-amino-2-methylpropanoic acid
  SITE 10: note = L-lysine, useful for stapling/stapled with another amino acid residue comprising a side chain acid group to form a staple through the 6-amino group
  SITE 11: note (S)-3-amino-1-((pent-4-en-1-yloxy)carbonyl)pyrrolidine-3-ca rboxylic acid, useful for stapling/stapled with another amino acid residue comprising an olefin group to form a staple through the olefin group
  SITE 12: note = (S)-2-amino-3-(thiophen-3-yl)propanoic acid
  SITE 13: note = (S)-2-amino-3-(benzo[b]thiophen-3-yl)propanoic acid
  SITE 14: note = L-glutamic acid, useful for stapling/stapled with another amino acid residue comprising a side chain amino group to form a staple through the 4-carboxyl group
  SITE 15: note = C-term amino
XDXXDXXAFKXXXEA

SEQ ID NO: 783 - protein, 16 aa, synthetic construct
  SITE 1: note = dimethylglycine
  SITE 2: note = (R)-2-allylpyrrolidine-2-carboxylic acid, useful for stapling/stapled with another amino acid residue comprising an olefin group to form a staple through the olefin group
  SITE 4: note = (S)-2-amino-4,4-dimethylpentanoic acid
  VARIANT 5: note = 2-amino-2-(pent-4-en-1-yl)hept-6-enoic acid, useful for stapling/stapled with another amino acid residue comprising an olefin group to form a staple through one of the two olefin groups and/or with another amino acid residue comprising an olefin group to form a staple through the other of the two olefin groups
  SITE 7: note = (S)-3-(2-amino-2-carboxyethyl)benzoic acid
  SITE 8: note = 2-amino-2-methylpropanoic acid
  SITE 11: note = L-lysine, useful for stapling/stapled with another amino acid residue comprising a side chain acid group to form a staple through the 6-amino group
  SITE 12: note (S)-3-amino-1-((pent-4-en-1-yloxy)carbonyl)pyrrolidine-3-ca rboxylic acid, useful for stapling/stapled with another amino acid residue comprising an olefin group to form a staple through the olefin group
  SITE 13: note = (S)-2-amino-3-(thiophen-3-yl)propanoic acid
  SITE 14: note = (S)-2-amino-3-(benzo[b]thiophen-3-yl)propanoic acid
  SITE 15: note = L-glutamic acid, useful for stapling/stapled with another amino acid residue comprising a side chain amino group to form a staple through the 4-carboxyl group
  SITE 16: note = C-term amino
GXDXXDXXAFKXXXEA

SEQ ID NO: 784 - protein, 15 aa, synthetic construct
  SITE 1: note = N-term 3-(4-methylpiperazin-1-yl)propanoic acid
  SITE 1: note = (R)-2-allylpyrrolidine-2-carboxylic acid, useful for stapling/stapled with another amino acid residue comprising an olefin group to form a staple through the olefin group
  SITE 3: note = (S)-2-amino-4,4-dimethylpentanoic acid
  VARIANT 4: note = 2-amino-2-(pent-4-en-1-yl)hept-6-enoic acid, useful for stapling/stapled with another amino acid residue comprising an olefin group to form a staple through one of the two olefin groups and/or with another amino acid residue comprising an olefin group to form a staple through the other of the two olefin groups
  SITE 6: note = (S)-3-(2-amino-2-carboxyethyl)benzoic acid
  SITE 7: note = 2-amino-2-methylpropanoic acid
  SITE 10: note = L-lysine, useful for stapling/stapled with another amino acid residue comprising a side chain acid group to form a staple through the 6-amino group
  SITE 11: note (S)-3-amino-1-((pent-4-en-1-yloxy)carbonyl)pyrrolidine-3-ca rboxylic acid, useful for stapling/stapled with another amino acid residue comprising an olefin group to form a staple through the olefin group
  SITE 12: note = (S)-2-amino-3-(thiophen-3-yl)propanoic acid
  SITE 13: note = (S)-2-amino-3-(benzo[b]thiophen-3-yl)propanoic acid
  SITE 14: note = L-glutamic acid, useful for stapling/stapled with another amino acid residue comprising a side chain amino group to form a staple through the 4-carboxyl group
  SITE 15: note = C-term amino
XDXXDXXAFKXXXEA

SEQ ID NO: 785 - protein, 15 aa, synthetic construct
  SITE 1: note = N-term 2-(4-methylpiperazin-1-yl)acetic acid
  SITE 1: note = (R)-2-allylpyrrolidine-2-carboxylic acid, useful for stapling/stapled with another amino acid residue comprising an olefin group to form a staple through the olefin group
  SITE 3: note = (S)-2-amino-4,4-dimethylpentanoic acid
  VARIANT 4: note = 2-amino-2-(pent-4-en-1-yl)hept-6-enoic acid, useful for stapling/stapled with another amino acid residue comprising an olefin group to form a staple through one of the two olefin groups and/or with another amino acid residue comprising an olefin group to form a staple through the other of the two olefin groups
  SITE 6: note = (S)-3-(2-amino-2-carboxyethyl)benzoic acid
  SITE 7: note = 2-amino-2-methylpropanoic acid
  SITE 10: note = L-lysine, useful for stapling/stapled with another amino acid residue comprising a side chain acid group to form a staple through the 6-amino group
  SITE 11: note (S)-3-amino-1-((pent-4-en-1-yloxy)carbonyl)pyrrolidine-3-ca rboxylic acid, useful for stapling/stapled with another amino acid residue comprising an olefin group to form a staple through the olefin group
  SITE 12: note = (S)-2-amino-3-(thiophen-3-yl)propanoic acid
  SITE 13: note = (S)-2-amino-3-(benzo[b]thiophen-3-yl)propanoic acid
  SITE 14: note = L-glutamic acid, useful for stapling/stapled with another amino acid residue comprising a side chain amino group to form a staple through the 4-carboxyl group
  SITE 15: note = C-term amino
XDXXDXXAFKXXXEA

SEQ ID NO: 786 - protein, 15 aa, synthetic construct
  SITE 1: note = N-term 1-methyl-1H-imidazole-4-sulfonic acid
  SITE 1: note = (R)-2-allylpyrrolidine-2-carboxylic acid, useful for stapling/stapled with another amino acid residue comprising an olefin group to form a staple through the olefin group
  SITE 3: note = (S)-2-amino-4,4-dimethylpentanoic acid
  VARIANT 4: note = 2-amino-2-(pent-4-en-1-yl)hept-6-enoic acid, useful for stapling/stapled with another amino acid residue comprising an olefin group to form a staple through one of the two olefin groups and/or with another amino acid residue comprising an olefin group to form a staple through the other of the two olefin groups
  SITE 6: note = (S)-3-(2-amino-2-carboxyethyl)benzoic acid
  SITE 7: note = 2-amino-2-methylpropanoic acid
  SITE 10: note = L-lysine, useful for stapling/stapled with another amino acid residue comprising a side chain acid group to form a staple through the 6-amino group
  SITE 11: note (S)-3-amino-1-((pent-4-en-1-yloxy)carbonyl)pyrrolidine-3-ca rboxylic acid, useful for stapling/stapled with another amino acid residue comprising an olefin group to form a staple through the olefin group
  SITE 12: note = (S)-2-amino-3-(thiophen-3-yl)propanoic acid
  SITE 13: note = (S)-2-amino-3-(benzo[b]thiophen-3-yl)propanoic acid
  SITE 14: note = L-glutamic acid, useful for stapling/stapled with another amino acid residue comprising a side chain amino group to form a staple through the 4-carboxyl group
  SITE 15: note = C-term amino
XDXXDXXAFKXXXEA

SEQ ID NO: 787 - protein, 15 aa, synthetic construct
  SITE 1: note = N-term quinoline-8-sulfonic acid
  SITE 1: note = (R)-2-allylpyrrolidine-2-carboxylic acid, useful for stapling/stapled with another amino acid residue comprising an olefin group to form a staple through the olefin group
  SITE 3: note = (S)-2-amino-4,4-dimethylpentanoic acid
  VARIANT 4: note = 2-amino-2-(pent-4-en-1-yl)hept-6-enoic acid, useful for stapling/stapled with another amino acid residue comprising an olefin group to form a staple through one of the two olefin groups and/or with another amino acid residue comprising an olefin group to form a staple through the other of the two olefin groups
  SITE 6: note = (S)-3-(2-amino-2-carboxyethyl)benzoic acid
  SITE 7: note = 2-amino-2-methylpropanoic acid
  SITE 10: note = L-lysine, useful for stapling/stapled with another amino acid residue comprising a side chain acid group to form a staple through the 6-amino group
  SITE 11: note (S)-3-amino-1-((pent-4-en-1-yloxy)carbonyl)pyrrolidine-3-ca rboxylic acid, useful for stapling/stapled with another amino acid residue comprising an olefin group to form a staple through the olefin group
  SITE 12: note = (S)-2-amino-3-(thiophen-3-yl)propanoic acid
  SITE 13: note = (S)-2-amino-3-(benzo[b]thiophen-3-yl)propanoic acid
  SITE 14: note = L-glutamic acid, useful for stapling/stapled with another amino acid residue comprising a side chain amino group to form a staple through the 4-carboxyl group
  SITE 15: note = C-term amino
XDXXDXXAFKXXXEA

SEQ ID NO: 788 - protein, 14 aa, synthetic construct
  SITE 1: note = N-term Acetic Acid
  SITE 1: note = (R)-2-allylpyrrolidine-2-carboxylic acid, useful for stapling/stapled with another amino acid residue comprising an olefin group to form a staple through the olefin group
  SITE 3: note = (S)-2-amino-4,4-dimethylpentanoic acid
  VARIANT 4: note = 2-amino-2-(pent-4-en-1-yl)hept-6-enoic acid, useful for stapling/stapled with another amino acid residue comprising an olefin group to form a staple through one of the two olefin groups and/or with another amino acid residue comprising an olefin group to form a staple through the other of the two olefin groups
  SITE 6: note = (S)-3-(2-amino-2-carboxyethyl)benzoic acid
  SITE 7: note = 2-amino-2-methylpropanoic acid
  SITE 10: note = (S)-2-amino-6-(1H-1,2,3-triazol-1-yl)hexanoic acid, useful for stapling/stapled with another amino acid residue to form a staple through the 4-position of the triazolyl group
  SITE 11: note (S)-3-amino-1-((pent-4-en-1-yloxy)carbonyl)pyrrolidine-3-ca rboxylic acid, useful for stapling/stapled with another amino acid residue comprising an olefin group to form a staple through the olefin group
  SITE 12: note = (S)-2-amino-3-(thiophen-3-yl)propanoic acid
  SITE 13: note = (S)-2-amino-3-(3,4-dichlorophenyl)propanoic acid
  SITE 14: note = L-alanine, useful for stapling/stapled with another amino acid residue comprising a triazolyl group to form a staple through the terminal methyl group
  SITE 14: note = C-term amino
XDXXDXXAFXXXXA

SEQ ID NO: 789 - protein, 15 aa, synthetic construct
  SITE 1: note = N-term Acetic Acid
  SITE 1: note = (R)-2-allylpyrrolidine-2-carboxylic acid, useful for stapling/stapled with another amino acid residue comprising an olefin group to form a staple through the olefin group
  SITE 3: note = (S)-2-amino-4,4-dimethylpentanoic acid
  VARIANT 4: note = 2-amino-2-(pent-4-en-1-yl)hept-6-enoic acid, useful for stapling/stapled with another amino acid residue comprising an olefin group to form a staple through one of the two olefin groups and/or with another amino acid residue comprising an olefin group to form a staple through the other of the two olefin groups
  SITE 6: note = (S)-3-(2-amino-2-carboxyethyl)benzoic acid
  SITE 7: note = 2-amino-2-methylpropanoic acid
  SITE 10: note = (S)-2-amino-6-(1H-1,2,3-triazol-1-yl)hexanoic acid, useful for stapling/stapled with another amino acid residue to form a staple through the 4-position of the triazolyl group
  SITE 11: note (S)-3-amino-1-((pent-4-en-1-yloxy)carbonyl)pyrrolidine-3-ca rboxylic acid, useful for stapling/stapled with another amino acid residue comprising an olefin group to form a staple through the olefin group
  SITE 12: note = (S)-2-amino-3-(thiophen-3-yl)propanoic acid
  SITE 13: note = (S)-2-amino-3-(3,4-dichlorophenyl)propanoic acid
  SITE 14: note = L-alanine, useful for stapling/stapled with another amino acid residue comprising a triazolyl group to form a staple through the terminal methyl group
  SITE 15: note = C-term amino
XDXXDXXAFXXXXAA

SEQ ID NO: 790 - protein, 14 aa, synthetic construct
  SITE 1: note = N-term Acetic Acid
  SITE 1: note = (R)-2-allylpyrrolidine-2-carboxylic acid, useful for stapling/stapled with another amino acid residue comprising an olefin group to form a staple through the olefin group
  VARIANT 4: note = 2-amino-2-(pent-4-en-1-yl)hept-6-enoic acid, useful for stapling/stapled with another amino acid residue comprising an olefin group to form a staple through one of the two olefin groups and/or with another amino acid residue comprising an olefin group to form a staple through the other of the two olefin groups
  SITE 6: note = (S)-3-(2-amino-2-carboxyethyl)benzoic acid
  SITE 7: note = 2-amino-2-methylpropanoic acid
  SITE 10: note = (S)-2-amino-6-(1H-1,2,3-triazol-1-yl)hexanoic acid, useful for stapling/stapled with another amino acid residue to form a staple through the 4-position of the triazolyl group
  SITE 11: note (S)-3-amino-1-((pent-4-en-1-yloxy)carbonyl)pyrrolidine-3-ca rboxylic acid, useful for stapling/stapled with another amino acid residue comprising an olefin group to form a staple through the olefin group
  SITE 12: note = (S)-2-amino-3-(thiophen-3-yl)propanoic acid
  SITE 13: note = (S)-2-amino-3-(3,4-dichlorophenyl)propanoic acid
  SITE 14: note = L-alanine, useful for stapling/stapled with another amino acid residue comprising a triazolyl group to form a staple through the terminal methyl group
  SITE 14: note = C-term amino
XDIXDXXAFXXXXA

SEQ ID NO: 791 - protein, 14 aa, synthetic construct
  SITE 1: note = N-term Acetic Acid
  SITE 1: note = (R)-2-allylpyrrolidine-2-carboxylic acid, useful for stapling/stapled with another amino acid residue comprising an olefin group to form a staple through the olefin group
  VARIANT 4: note = 2-amino-2-(pent-4-en-1-yl)hept-6-enoic acid, useful for stapling/stapled with another amino acid residue comprising an olefin group to form a staple through one of the two olefin groups and/or with another amino acid residue comprising an olefin group to form a staple through the other of the two olefin groups
  SITE 6: note = (S)-3-(2-amino-2-carboxyethyl)benzoic acid
  SITE 10: note = (S)-2-amino-6-(1H-1,2,3-triazol-1-yl)hexanoic acid, useful for stapling/stapled with another amino acid residue to form a staple through the 4-position of the triazolyl group
  SITE 11: note (S)-3-amino-1-((pent-4-en-1-yloxy)carbonyl)pyrrolidine-3-ca rboxylic acid, useful for stapling/stapled with another amino acid residue comprising an olefin group to form a staple through the olefin group
  SITE 12: note = (S)-2-amino-3-(thiophen-3-yl)propanoic acid
  SITE 13: note = (S)-2-amino-3-(3,4-dichlorophenyl)propanoic acid
  SITE 14: note = L-alanine, useful for stapling/stapled with another amino acid residue comprising a triazolyl group to form a staple through the terminal methyl group
  SITE 14: note = C-term amino
XDIXDXFAFXXXXA

SEQ ID NO: 792 - protein, 15 aa, synthetic construct
  SITE 1: note = N-term Acetic Acid
  SITE 1: note = (R)-2-allylpyrrolidine-2-carboxylic acid, useful for stapling/stapled with another amino acid residue comprising an olefin group to form a staple through the olefin group
  VARIANT 4: note = 2-amino-2-(pent-4-en-1-yl)hept-6-enoic acid, useful for stapling/stapled with another amino acid residue comprising an olefin group to form a staple through one of the two olefin groups and/or with another amino acid residue comprising an olefin group to form a staple through the other of the two olefin groups
  SITE 6: note = (S)-3-(2-amino-2-carboxyethyl)benzoic acid
  SITE 10: note = (S)-2-amino-6-(1H-1,2,3-triazol-1-yl)hexanoic acid, useful for stapling/stapled with another amino acid residue to form a staple through the 4-position of the triazolyl group
  SITE 11: note (S)-3-amino-1-((pent-4-en-1-yloxy)carbonyl)pyrrolidine-3-ca rboxylic acid, useful for stapling/stapled with another amino acid residue comprising an olefin group to form a staple through the olefin group
  SITE 12: note = (S)-2-amino-3-(thiophen-3-yl)propanoic acid
  SITE 13: note = (S)-2-amino-3-(3,4-dichlorophenyl)propanoic acid
  SITE 14: note = L-alanine, useful for stapling/stapled with another amino acid residue comprising a triazolyl group to form a staple through the terminal methyl group
  SITE 15: note = C-term amino
XDIXDXFAFXXXXAA

SEQ ID NO: 793 - protein, 14 aa, synthetic construct
  SITE 1: note = N-term Acetic Acid
  SITE 1: note = (R)-2-allylpyrrolidine-2-carboxylic acid, useful for stapling/stapled with another amino acid residue comprising an olefin group to form a staple through the olefin group
  SITE 3: note = (S)-2-amino-4,4-dimethylpentanoic acid
  VARIANT 4: note = 2-amino-2-(pent-4-en-1-yl)hept-6-enoic acid, useful for stapling/stapled with another amino acid residue comprising an olefin group to form a staple through one of the two olefin groups and/or with another amino acid residue comprising an olefin group to form a staple through the other of the two olefin groups
  SITE 6: note = (S)-3-(2-amino-2-carboxyethyl)benzoic acid
  SITE 7: note = 2-amino-2-methylpropanoic acid
  SITE 10: note = (S)-2-amino-6-(1H-1,2,3-triazol-1-yl)hexanoic acid, useful for stapling/stapled with another amino acid residue to form a staple through the 4-position of the triazolyl group
  SITE 11: note (S)-3-amino-1-((pent-4-en-1-yloxy)carbonyl)pyrrolidine-3-ca rboxylic acid, useful for stapling/stapled with another amino acid residue comprising an olefin group to form a staple through the olefin group
  SITE 13: note = (S)-2-amino-3-(3,4-dichlorophenyl)propanoic acid
  SITE 14: note = L-alanine, useful for stapling/stapled with another amino acid residue comprising a triazolyl group to form a staple through the terminal methyl group
  SITE 14: note = C-term amino
XDXXDXXAFXXFXA

SEQ ID NO: 794 - protein, 15 aa, synthetic construct
  SITE 1: note = N-term Acetic Acid
  SITE 1: note = (R)-2-allylpyrrolidine-2-carboxylic acid, useful for stapling/stapled with another amino acid residue comprising an olefin group to form a staple through the olefin group
  SITE 3: note = (S)-2-amino-4,4-dimethylpentanoic acid
  VARIANT 4: note = 2-amino-2-(pent-4-en-1-yl)hept-6-enoic acid, useful for stapling/stapled with another amino acid residue comprising an olefin group to form a staple through one of the two olefin groups and/or with another amino acid residue comprising an olefin group to form a staple through the other of the two olefin groups
  SITE 6: note = (S)-3-(2-amino-2-carboxyethyl)benzoic acid
  SITE 7: note = 2-amino-2-methylpropanoic acid
  SITE 10: note = (S)-2-amino-6-(1H-1,2,3-triazol-1-yl)hexanoic acid, useful for stapling/stapled with another amino acid residue to form a staple through the 4-position of the triazolyl group
  SITE 11: note (S)-3-amino-1-((pent-4-en-1-yloxy)carbonyl)pyrrolidine-3-ca rboxylic acid, useful for stapling/stapled with another amino acid residue comprising an olefin group to form a staple through the olefin group
  SITE 13: note = (S)-2-amino-3-(3,4-dichlorophenyl)propanoic acid
  SITE 14: note = L-alanine, useful for stapling/stapled with another amino acid residue comprising a triazolyl group to form a staple through the terminal methyl group
  SITE 15: note = C-term amino
XDXXDXXAFXXFXAA

SEQ ID NO: 795 - protein, 14 aa, synthetic construct
  SITE 1: note = N-term Acetic Acid
  SITE 1: note = (R)-2-allylpyrrolidine-2-carboxylic acid, useful for stapling/stapled with another amino acid residue comprising an olefin group to form a staple through the olefin group
  VARIANT 4: note = 2-amino-2-(pent-4-en-1-yl)hept-6-enoic acid, useful for stapling/stapled with another amino acid residue comprising an olefin group to form a staple through one of the two olefin groups and/or with another amino acid residue comprising an olefin group to form a staple through the other of the two olefin groups
  SITE 6: note = (S)-3-(2-amino-2-carboxyethyl)benzoic acid
  SITE 7: note = 2-amino-2-methylpropanoic acid
  SITE 10: note = (S)-2-amino-6-(1H-1,2,3-triazol-1-yl)hexanoic acid, useful for stapling/stapled with another amino acid residue to form a staple through the 4-position of the triazolyl group
  SITE 11: note (S)-3-amino-1-((pent-4-en-1-yloxy)carbonyl)pyrrolidine-3-ca rboxylic acid, useful for stapling/stapled with another amino acid residue comprising an olefin group to form a staple through the olefin group
  SITE 13: note = (S)-2-amino-3-(3,4-dichlorophenyl)propanoic acid
  SITE 14: note = L-alanine, useful for stapling/stapled with another amino acid residue comprising a triazolyl group to form a staple through the terminal methyl group
  SITE 14: note = C-term amino
XDIXDXXAFXXFXA

SEQ ID NO: 796 - protein, 15 aa, synthetic construct
  SITE 1: note = N-term Acetic Acid
  SITE 1: note = (R)-2-allylpyrrolidine-2-carboxylic acid, useful for stapling/stapled with another amino acid residue comprising an olefin group to form a staple through the olefin group
  VARIANT 4: note = 2-amino-2-(pent-4-en-1-yl)hept-6-enoic acid, useful for stapling/stapled with another amino acid residue comprising an olefin group to form a staple through one of the two olefin groups and/or with another amino acid residue comprising an olefin group to form a staple through the other of the two olefin groups
  SITE 6: note = (S)-3-(2-amino-2-carboxyethyl)benzoic acid
  SITE 7: note = 2-amino-2-methylpropanoic acid
  SITE 10: note = (S)-2-amino-6-(1H-1,2,3-triazol-1-yl)hexanoic acid, useful for stapling/stapled with another amino acid residue to form a staple through the 4-position of the triazolyl group
  SITE 11: note (S)-3-amino-1-((pent-4-en-1-yloxy)carbonyl)pyrrolidine-3-ca rboxylic acid, useful for stapling/stapled with another amino acid residue comprising an olefin group to form a staple through the olefin group
  SITE 13: note = (S)-2-amino-3-(3,4-dichlorophenyl)propanoic acid
  SITE 14: note = L-alanine, useful for stapling/stapled with another amino acid residue comprising a triazolyl group to form a staple through the terminal methyl group
  SITE 15: note = C-term amino
XDIXDXXAFXXFXAA

SEQ ID NO: 797 - protein, 14 aa, synthetic construct
  SITE 1: note = N-term Acetic Acid
  SITE 1: note = (R)-2-allylpyrrolidine-2-carboxylic acid, useful for stapling/stapled with another amino acid residue comprising an olefin group to form a staple through the olefin group
  VARIANT 4: note = 2-amino-2-(pent-4-en-1-yl)hept-6-enoic acid, useful for stapling/stapled with another amino acid residue comprising an olefin group to form a staple through one of the two olefin groups and/or with another amino acid residue comprising an olefin group to form a staple through the other of the two olefin groups
  SITE 6: note = (S)-3-(2-amino-2-carboxyethyl)benzoic acid
  SITE 10: note = (S)-2-amino-6-(1H-1,2,3-triazol-1-yl)hexanoic acid, useful for stapling/stapled with another amino acid residue to form a staple through the 4-position of the triazolyl group
  SITE 11: note (S)-3-amino-1-((pent-4-en-1-yloxy)carbonyl)pyrrolidine-3-ca rboxylic acid, useful for stapling/stapled with another amino acid residue comprising an olefin group to form a staple through the olefin group
  SITE 13: note = (S)-2-amino-3-(3,4-dichlorophenyl)propanoic acid
  SITE 14: note = L-alanine, useful for stapling/stapled with another amino acid residue comprising a triazolyl group to form a staple through the terminal methyl group
  SITE 14: note = C-term amino
XDIXDXFAFXXFXA

SEQ ID NO: 798 - protein, 15 aa, synthetic construct
  SITE 1: note = N-term Acetic Acid
  SITE 1: note = (R)-2-allylpyrrolidine-2-carboxylic acid, useful for stapling/stapled with another amino acid residue comprising an olefin group to form a staple through the olefin group
  VARIANT 4: note = 2-amino-2-(pent-4-en-1-yl)hept-6-enoic acid, useful for stapling/stapled with another amino acid residue comprising an olefin group to form a staple through one of the two olefin groups and/or with another amino acid residue comprising an olefin group to form a staple through the other of the two olefin groups
  SITE 6: note = (S)-3-(2-amino-2-carboxyethyl)benzoic acid
  SITE 10: note = (S)-2-amino-6-(1H-1,2,3-triazol-1-yl)hexanoic acid, useful for stapling/stapled with another amino acid residue to form a staple through the 4-position of the triazolyl group
  SITE 11: note (S)-3-amino-1-((pent-4-en-1-yloxy)carbonyl)pyrrolidine-3-ca rboxylic acid, useful for stapling/stapled with another amino acid residue comprising an olefin group to form a staple through the olefin group
  SITE 13: note = (S)-2-amino-3-(3,4-dichlorophenyl)propanoic acid
  SITE 14: note = L-alanine, useful for stapling/stapled with another amino acid residue comprising a triazolyl group to form a staple through the terminal methyl group
  SITE 15: note = C-term amino
XDIXDXFAFXXFXAA

SEQ ID NO: 799 - protein, 14 aa, synthetic construct
  SITE 1: note = N-term Acetic Acid
  SITE 1: note = (R)-2-allylpyrrolidine-2-carboxylic acid, useful for stapling/stapled with another amino acid residue comprising an olefin group to form a staple through the olefin group
  SITE 3: note = (S)-2-amino-4,4-dimethylpentanoic acid
  VARIANT 4: note = 2-amino-2-(pent-4-en-1-yl)hept-6-enoic acid, useful for stapling/stapled with another amino acid residue comprising an olefin group to form a staple through one of the two olefin groups and/or with another amino acid residue comprising an olefin group to form a staple through the other of the two olefin groups
  SITE 6: note = (S)-3-(2-amino-2-carboxyethyl)benzoic acid
  SITE 7: note = 2-amino-2-methylpropanoic acid
  SITE 10: note = L-lysine, useful for stapling/stapled with another amino acid residue comprising a side chain acid group to form a staple through the 6-amino group
  SITE 11: note (S)-3-amino-1-((pent-4-en-1-yloxy)carbonyl)pyrrolidine-3-ca rboxylic acid, useful for stapling/stapled with another amino acid residue comprising an olefin group to form a staple through the olefin group
  SITE 12: note = (S)-2-amino-3-(thiophen-3-yl)propanoic acid
  SITE 13: note = (S)-2-amino-3-(3,4-dimethylphenyl)propanoic acid
  SITE 14: note = L-glutamic acid, useful for stapling/stapled with another amino acid residue comprising a side chain amino group to form a staple through the 4-carboxyl group
  SITE 14: note = C-term amino
XDXXDXXAFKXXXE

SEQ ID NO: 800 - protein, 15 aa, synthetic construct
  SITE 1: note = N-term Acetic Acid
  SITE 1: note = (R)-2-allylpyrrolidine-2-carboxylic acid, useful for stapling/stapled with another amino acid residue comprising an olefin group to form a staple through the olefin group
  VARIANT 4: note = 2-amino-2-(pent-4-en-1-yl)hept-6-enoic acid, useful for stapling/stapled with another amino acid residue comprising an olefin group to form a staple through one of the two olefin groups and/or with another amino acid residue comprising an olefin group to form a staple through the other of the two olefin groups
  SITE 6: note = (S)-3-(2-amino-2-carboxyethyl)benzoic acid
  SITE 7: note = 2-amino-2-methylpropanoic acid
  SITE 10: note = L-lysine, useful for stapling/stapled with another amino acid residue comprising a side chain acid group to form a staple through the 6-amino group
  SITE 11: note (S)-3-amino-1-((pent-4-en-1-yloxy)carbonyl)pyrrolidine-3-ca rboxylic acid, useful for stapling/stapled with another amino acid residue comprising an olefin group to form a staple through the olefin group
  SITE 12: note = (S)-2-amino-3-(thiophen-3-yl)propanoic acid
  SITE 13: note = (S)-2-amino-3-(3,4-dimethylphenyl)propanoic acid
  SITE 14: note = L-glutamic acid, useful for stapling/stapled with another amino acid residue comprising a side chain amino group to form a staple through the 4-carboxyl group
  SITE 15: note = C-term amino
XDIXDXXAFKXXXEA

SEQ ID NO: 801 - protein, 14 aa, synthetic construct
  SITE 1: note = N-term Acetic Acid
  SITE 1: note = (R)-2-allylpyrrolidine-2-carboxylic acid, useful for stapling/stapled with another amino acid residue comprising an olefin group to form a staple through the olefin group
  VARIANT 4: note = 2-amino-2-(pent-4-en-1-yl)hept-6-enoic acid, useful for stapling/stapled with another amino acid residue comprising an olefin group to form a staple through one of the two olefin groups and/or with another amino acid residue comprising an olefin group to form a staple through the other of the two olefin groups
  SITE 6: note = (S)-3-(2-amino-2-carboxyethyl)benzoic acid
  SITE 7: note = 2-amino-2-methylpropanoic acid
  SITE 10: note = L-lysine, useful for stapling/stapled with another amino acid residue comprising a side chain acid group to form a staple through the 6-amino group
  SITE 11: note (S)-3-amino-1-((pent-4-en-1-yloxy)carbonyl)pyrrolidine-3-ca rboxylic acid, useful for stapling/stapled with another amino acid residue comprising an olefin group to form a staple through the olefin group
  SITE 12: note = (S)-2-amino-3-(thiophen-3-yl)propanoic acid
  SITE 13: note = (S)-2-amino-3-(3,4-dimethylphenyl)propanoic acid
  SITE 14: note = L-glutamic acid, useful for stapling/stapled with another amino acid residue comprising a side chain amino group to form a staple through the 4-carboxyl group
  SITE 14: note = C-term amino
XDIXDXXAFKXXXE

SEQ ID NO: 802 - protein, 15 aa, synthetic construct
  SITE 1: note = N-term Acetic Acid
  SITE 1: note = (R)-2-allylpyrrolidine-2-carboxylic acid, useful for stapling/stapled with another amino acid residue comprising an olefin group to form a staple through the olefin group
  VARIANT 4: note = 2-amino-2-(pent-4-en-1-yl)hept-6-enoic acid, useful for stapling/stapled with another amino acid residue comprising an olefin group to form a staple through one of the two olefin groups and/or with another amino acid residue comprising an olefin group to form a staple through the other of the two olefin groups
  SITE 6: note = (S)-3-(2-amino-2-carboxyethyl)benzoic acid
  SITE 10: note = L-lysine, useful for stapling/stapled with another amino acid residue comprising a side chain acid group to form a staple through the 6-amino group
  SITE 11: note (S)-3-amino-1-((pent-4-en-1-yloxy)carbonyl)pyrrolidine-3-ca rboxylic acid, useful for stapling/stapled with another amino acid residue comprising an olefin group to form a staple through the olefin group
  SITE 12: note = (S)-2-amino-3-(thiophen-3-yl)propanoic acid
  SITE 13: note = (S)-2-amino-3-(3,4-dimethylphenyl)propanoic acid
  SITE 14: note = L-glutamic acid, useful for stapling/stapled with another amino acid residue comprising a side chain amino group to form a staple through the 4-carboxyl group
  SITE 15: note = C-term amino
XDIXDXFAFKXXXEA

SEQ ID NO: 803 - protein, 14 aa, synthetic construct
  SITE 1: note = N-term Acetic Acid
  SITE 1: note = (R)-2-allylpyrrolidine-2-carboxylic acid, useful for stapling/stapled with another amino acid residue comprising an olefin group to form a staple through the olefin group
  VARIANT 4: note = 2-amino-2-(pent-4-en-1-yl)hept-6-enoic acid, useful for stapling/stapled with another amino acid residue comprising an olefin group to form a staple through one of the two olefin groups and/or with another amino acid residue comprising an olefin group to form a staple through the other of the two olefin groups
  SITE 6: note = (S)-3-(2-amino-2-carboxyethyl)benzoic acid
  SITE 10: note = L-lysine, useful for stapling/stapled with another amino acid residue comprising a side chain acid group to form a staple through the 6-amino group
  SITE 11: note (S)-3-amino-1-((pent-4-en-1-yloxy)carbonyl)pyrrolidine-3-ca rboxylic acid, useful for stapling/stapled with another amino acid residue comprising an olefin group to form a staple through the olefin group
  SITE 12: note = (S)-2-amino-3-(thiophen-3-yl)propanoic acid
  SITE 13: note = (S)-2-amino-3-(3,4-dimethylphenyl)propanoic acid
  SITE 14: note = L-glutamic acid, useful for stapling/stapled with another amino acid residue comprising a side chain amino group to form a staple through the 4-carboxyl group
  SITE 14: note = C-term amino
XDIXDXFAFKXXXE

SEQ ID NO: 804 - protein, 14 aa, synthetic construct
  SITE 1: note = N-term Acetic Acid
  SITE 1: note = (R)-2-allylpyrrolidine-2-carboxylic acid, useful for stapling/stapled with another amino acid residue comprising an olefin group to form a staple through the olefin group
  SITE 3: note = (S)-2-amino-4,4-dimethylpentanoic acid
  VARIANT 4: note = 2-amino-2-(pent-4-en-1-yl)hept-6-enoic acid, useful for stapling/stapled with another amino acid residue comprising an olefin group to form a staple through one of the two olefin groups and/or with another amino acid residue comprising an olefin group to form a staple through the other of the two olefin groups
  SITE 6: note = (S)-3-(2-amino-2-carboxyethyl)benzoic acid
  SITE 7: note = 2-amino-2-methylpropanoic acid
  SITE 10: note = L-lysine, useful for stapling/stapled with another amino acid residue comprising a side chain acid group to form a staple through the 6-amino group
  SITE 11: note (S)-3-amino-1-((pent-4-en-1-yloxy)carbonyl)pyrrolidine-3-ca rboxylic acid, useful for stapling/stapled with another amino acid residue comprising an olefin group to form a staple through the olefin group
  SITE 13: note = (S)-2-amino-3-(3,4-dimethylphenyl)propanoic acid
  SITE 14: note = L-glutamic acid, useful for stapling/stapled with another amino acid residue comprising a side chain amino group to form a staple through the 4-carboxyl group
  SITE 14: note = C-term amino
XDXXDXXAFKXFXE

SEQ ID NO: 805 - protein, 15 aa, synthetic construct
  SITE 1: note = N-term Acetic Acid
  SITE 1: note = (R)-2-allylpyrrolidine-2-carboxylic acid, useful for stapling/stapled with another amino acid residue comprising an olefin group to form a staple through the olefin group
  VARIANT 4: note = 2-amino-2-(pent-4-en-1-yl)hept-6-enoic acid, useful for stapling/stapled with another amino acid residue comprising an olefin group to form a staple through one of the two olefin groups and/or with another amino acid residue comprising an olefin group to form a staple through the other of the two olefin groups
  SITE 6: note = (S)-3-(2-amino-2-carboxyethyl)benzoic acid
  SITE 7: note = 2-amino-2-methylpropanoic acid
  SITE 10: note = L-lysine, useful for stapling/stapled with another amino acid residue comprising a side chain acid group to form a staple through the 6-amino group
  SITE 11: note (S)-3-amino-1-((pent-4-en-1-yloxy)carbonyl)pyrrolidine-3-ca rboxylic acid, useful for stapling/stapled with another amino acid residue comprising an olefin group to form a staple through the olefin group
  SITE 13: note = (S)-2-amino-3-(3,4-dimethylphenyl)propanoic acid
  SITE 14: note = L-glutamic acid, useful for stapling/stapled with another amino acid residue comprising a side chain amino group to form a staple through the 4-carboxyl group
  SITE 15: note = C-term amino
XDIXDXXAFKXFXEA

SEQ ID NO: 806 - protein, 14 aa, synthetic construct
  SITE 1: note = N-term Acetic Acid
  SITE 1: note = (R)-2-allylpyrrolidine-2-carboxylic acid, useful for stapling/stapled with another amino acid residue comprising an olefin group to form a staple through the olefin group
  VARIANT 4: note = 2-amino-2-(pent-4-en-1-yl)hept-6-enoic acid, useful for stapling/stapled with another amino acid residue comprising an olefin group to form a staple through one of the two olefin groups and/or with another amino acid residue comprising an olefin group to form a staple through the other of the two olefin groups
  SITE 6: note = (S)-3-(2-amino-2-carboxyethyl)benzoic acid
  SITE 7: note = 2-amino-2-methylpropanoic acid
  SITE 10: note = L-lysine, useful for stapling/stapled with another amino acid residue comprising a side chain acid group to form a staple through the 6-amino group
  SITE 11: note (S)-3-amino-1-((pent-4-en-1-yloxy)carbonyl)pyrrolidine-3-ca rboxylic acid, useful for stapling/stapled with another amino acid residue comprising an olefin group to form a staple through the olefin group
  SITE 13: note = (S)-2-amino-3-(3,4-dimethylphenyl)propanoic acid
  SITE 14: note = L-glutamic acid, useful for stapling/stapled with another amino acid residue comprising a side chain amino group to form a staple through the 4-carboxyl group
  SITE 14: note = C-term amino
XDIXDXXAFKXFXE

SEQ ID NO: 807 - protein, 15 aa, synthetic construct
  SITE 1: note = N-term Acetic Acid
  SITE 1: note = (R)-2-allylpyrrolidine-2-carboxylic acid, useful for stapling/stapled with another amino acid residue comprising an olefin group to form a staple through the olefin group
  VARIANT 4: note = 2-amino-2-(pent-4-en-1-yl)hept-6-enoic acid, useful for stapling/stapled with another amino acid residue comprising an olefin group to form a staple through one of the two olefin groups and/or with another amino acid residue comprising an olefin group to form a staple through the other of the two olefin groups
  SITE 6: note = (S)-3-(2-amino-2-carboxyethyl)benzoic acid
  SITE 10: note = L-lysine, useful for stapling/stapled with another amino acid residue comprising a side chain acid group to form a staple through the 6-amino group
  SITE 11: note (S)-3-amino-1-((pent-4-en-1-yloxy)carbonyl)pyrrolidine-3-ca rboxylic acid, useful for stapling/stapled with another amino acid residue comprising an olefin group to form a staple through the olefin group
  SITE 13: note = (S)-2-amino-3-(3,4-dimethylphenyl)propanoic acid
  SITE 14: note = L-glutamic acid, useful for stapling/stapled with another amino acid residue comprising a side chain amino group to form a staple through the 4-carboxyl group
  SITE 15: note = C-term amino
XDIXDXFAFKXFXEA

SEQ ID NO: 808 - protein, 14 aa, synthetic construct
  SITE 1: note = N-term Acetic Acid
  SITE 1: note = (R)-2-allylpyrrolidine-2-carboxylic acid, useful for stapling/stapled with another amino acid residue comprising an olefin group to form a staple through the olefin group
  VARIANT 4: note = 2-amino-2-(pent-4-en-1-yl)hept-6-enoic acid, useful for stapling/stapled with another amino acid residue comprising an olefin group to form a staple through one of the two olefin groups and/or with another amino acid residue comprising an olefin group to form a staple through the other of the two olefin groups
  SITE 6: note = (S)-3-(2-amino-2-carboxyethyl)benzoic acid
  SITE 10: note = L-lysine, useful for stapling/stapled with another amino acid residue comprising a side chain acid group to form a staple through the 6-amino group
  SITE 11: note (S)-3-amino-1-((pent-4-en-1-yloxy)carbonyl)pyrrolidine-3-ca rboxylic acid, useful for stapling/stapled with another amino acid residue comprising an olefin group to form a staple through the olefin group
  SITE 13: note = (S)-2-amino-3-(3,4-dimethylphenyl)propanoic acid
  SITE 14: note = L-glutamic acid, useful for stapling/stapled with another amino acid residue comprising a side chain amino group to form a staple through the 4-carboxyl group
  SITE 14: note = C-term amino
XDIXDXFAFKXFXE

SEQ ID NO: 809 - protein, 14 aa, synthetic construct
  SITE 1: note = N-term Acetic Acid
  SITE 1: note = (R)-2-allylpyrrolidine-2-carboxylic acid, useful for stapling/stapled with another amino acid residue comprising an olefin group to form a staple through the olefin group
  SITE 3: note = (S)-2-amino-3,3-diphenylpropanoic acid
  VARIANT 4: note = 2-amino-2-(pent-4-en-1-yl)hept-6-enoic acid, useful for stapling/stapled with another amino acid residue comprising an olefin group to form a staple through one of the two olefin groups and/or with another amino acid residue comprising an olefin group to form a staple through the other of the two olefin groups
  SITE 6: note = (S)-3-(2-amino-2-carboxyethyl)benzoic acid
  SITE 7: note = 2-amino-2-methylpropanoic acid
  SITE 10: note = L-lysine, useful for stapling/stapled with another amino acid residue comprising a side chain acid group to form a staple through the 6-amino group
  SITE 11: note (S)-3-amino-1-((pent-4-en-1-yloxy)carbonyl)pyrrolidine-3-ca rboxylic acid, useful for stapling/stapled with another amino acid residue comprising an olefin group to form a staple through the olefin group
  SITE 12: note = (S)-2-amino-3-(thiophen-3-yl)propanoic acid
  SITE 13: note = (S)-2-amino-3-(3,4-dichlorophenyl)propanoic acid
  SITE 14: note = L-glutamic acid, useful for stapling/stapled with another amino acid residue comprising a side chain amino group to form a staple through the 4-carboxyl group
  SITE 14: note = C-term amino
XDXXDXXAFKXXXE

SEQ ID NO: 810 - protein, 15 aa, synthetic construct
  SITE 1: note = N-term Acetic Acid
  SITE 1: note = (R)-2-allylpyrrolidine-2-carboxylic acid, useful for stapling/stapled with another amino acid residue comprising an olefin group to form a staple through the olefin group
  SITE 3: note = (S)-2-amino-3,3-diphenylpropanoic acid
  VARIANT 4: note = 2-amino-2-(pent-4-en-1-yl)hept-6-enoic acid, useful for stapling/stapled with another amino acid residue comprising an olefin group to form a staple through one of the two olefin groups and/or with another amino acid residue comprising an olefin group to form a staple through the other of the two olefin groups
  SITE 6: note = (S)-3-(2-amino-2-carboxyethyl)benzoic acid
  SITE 7: note = 2-amino-2-methylpropanoic acid
  SITE 10: note = L-lysine, useful for stapling/stapled with another amino acid residue comprising a side chain acid group to form a staple through the 6-amino group
  SITE 11: note (S)-3-amino-1-((pent-4-en-1-yloxy)carbonyl)pyrrolidine-3-ca rboxylic acid, useful for stapling/stapled with another amino acid residue comprising an olefin group to form a staple through the olefin group
  SITE 12: note = (S)-2-amino-3-(thiophen-3-yl)propanoic acid
  SITE 13: note = (S)-2-amino-3-(3,4-dichlorophenyl)propanoic acid
  SITE 14: note = L-glutamic acid, useful for stapling/stapled with another amino acid residue comprising a side chain amino group to form a staple through the 4-carboxyl group
  SITE 15: note = C-term amino
XDXXDXXAFKXXXEA

SEQ ID NO: 811 - protein, 15 aa, synthetic construct
  SITE 1: note = N-term Acetic Acid
  SITE 1: note = (R)-2-allylpyrrolidine-2-carboxylic acid, useful for stapling/stapled with another amino acid residue comprising an olefin group to form a staple through the olefin group
  SITE 3: note = (S)-2-amino-3,3-diphenylpropanoic acid
  VARIANT 4: note = 2-amino-2-(pent-4-en-1-yl)hept-6-enoic acid, useful for stapling/stapled with another amino acid residue comprising an olefin group to form a staple through one of the two olefin groups and/or with another amino acid residue comprising an olefin group to form a staple through the other of the two olefin groups
  SITE 6: note = (S)-3-(2-amino-2-carboxyethyl)benzoic acid
  SITE 7: note = 2-amino-2-methylpropanoic acid
  SITE 10: note = L-lysine, useful for stapling/stapled with another amino acid residue comprising a side chain acid group to form a staple through the 6-amino group
  SITE 11: note (S)-3-amino-1-((pent-4-en-1-yloxy)carbonyl)pyrrolidine-3-ca rboxylic acid, useful for stapling/stapled with another amino acid residue comprising an olefin group to form a staple through the olefin group
  SITE 12: note = (S)-2-amino-3-(thiophen-3-yl)propanoic acid
  SITE 13: note = (S)-2-amino-3-(3,4-dichlorophenyl)propanoic acid
  SITE 14: note = L-glutamic acid, useful for stapling/stapled with another amino acid residue comprising a side chain amino group to form a staple through the 4-carboxyl group
  SITE 15: note = C-term amino
XDXXDXXAFKXXXES

SEQ ID NO: 812 - protein, 14 aa, synthetic construct
  SITE 1: note = N-term Acetic Acid
  SITE 1: note = (R)-2-allylpyrrolidine-2-carboxylic acid, useful for stapling/stapled with another amino acid residue comprising an olefin group to form a staple through the olefin group
  SITE 3: note = (S)-2-amino-3,3-diphenylpropanoic acid
  VARIANT 4: note = 2-amino-2-(pent-4-en-1-yl)hept-6-enoic acid, useful for stapling/stapled with another amino acid residue comprising an olefin group to form a staple through one of the two olefin groups and/or with another amino acid residue comprising an olefin group to form a staple through the other of the two olefin groups
  SITE 6: note = (S)-3-(2-amino-2-carboxyethyl)benzoic acid
  SITE 10: note = L-lysine, useful for stapling/stapled with another amino acid residue comprising a side chain acid group to form a staple through the 6-amino group
  SITE 11: note (S)-3-amino-1-((pent-4-en-1-yloxy)carbonyl)pyrrolidine-3-ca rboxylic acid, useful for stapling/stapled with another amino acid residue comprising an olefin group to form a staple through the olefin group
  SITE 12: note = (S)-2-amino-3-(thiophen-3-yl)propanoic acid
  SITE 13: note = (S)-2-amino-3-(3,4-dichlorophenyl)propanoic acid
  SITE 14: note = L-glutamic acid, useful for stapling/stapled with another amino acid residue comprising a side chain amino group to form a staple through the 4-carboxyl group
  SITE 14: note = C-term amino
XDXXDXAAFKXXXE

SEQ ID NO: 813 - protein, 15 aa, synthetic construct
  SITE 1: note = N-term Acetic Acid
  SITE 1: note = (R)-2-allylpyrrolidine-2-carboxylic acid, useful for stapling/stapled with another amino acid residue comprising an olefin group to form a staple through the olefin group
  SITE 3: note = (S)-2-amino-3,3-diphenylpropanoic acid
  VARIANT 4: note = 2-amino-2-(pent-4-en-1-yl)hept-6-enoic acid, useful for stapling/stapled with another amino acid residue comprising an olefin group to form a staple through one of the two olefin groups and/or with another amino acid residue comprising an olefin group to form a staple through the other of the two olefin groups
  SITE 6: note = (S)-3-(2-amino-2-carboxyethyl)benzoic acid
  SITE 10: note = L-lysine, useful for stapling/stapled with another amino acid residue comprising a side chain acid group to form a staple through the 6-amino group
  SITE 11: note (S)-3-amino-1-((pent-4-en-1-yloxy)carbonyl)pyrrolidine-3-ca rboxylic acid, useful for stapling/stapled with another amino acid residue comprising an olefin group to form a staple through the olefin group
  SITE 12: note = (S)-2-amino-3-(thiophen-3-yl)propanoic acid
  SITE 13: note = (S)-2-amino-3-(3,4-dichlorophenyl)propanoic acid
  SITE 14: note = L-glutamic acid, useful for stapling/stapled with another amino acid residue comprising a side chain amino group to form a staple through the 4-carboxyl group
  SITE 15: note = C-term amino
XDXXDXAAFKXXXEA

SEQ ID NO: 814 - protein, 15 aa, synthetic construct
  SITE 1: note = N-term Acetic Acid
  SITE 1: note = (R)-2-allylpyrrolidine-2-carboxylic acid, useful for stapling/stapled with another amino acid residue comprising an olefin group to form a staple through the olefin group
  SITE 3: note = (S)-2-amino-3,3-diphenylpropanoic acid
  VARIANT 4: note = 2-amino-2-(pent-4-en-1-yl)hept-6-enoic acid, useful for stapling/stapled with another amino acid residue comprising an olefin group to form a staple through one of the two olefin groups and/or with another amino acid residue comprising an olefin group to form a staple through the other of the two olefin groups
  SITE 6: note = (S)-3-(2-amino-2-carboxyethyl)benzoic acid
  SITE 10: note = L-lysine, useful for stapling/stapled with another amino acid residue comprising a side chain acid group to form a staple through the 6-amino group
  SITE 11: note (S)-3-amino-1-((pent-4-en-1-yloxy)carbonyl)pyrrolidine-3-ca rboxylic acid, useful for stapling/stapled with another amino acid residue comprising an olefin group to form a staple through the olefin group
  SITE 12: note = (S)-2-amino-3-(thiophen-3-yl)propanoic acid
  SITE 13: note = (S)-2-amino-3-(3,4-dichlorophenyl)propanoic acid
  SITE 14: note = L-glutamic acid, useful for stapling/stapled with another amino acid residue comprising a side chain amino group to form a staple through the 4-carboxyl group
  SITE 15: note = C-term amino
XDXXDXAAFKXXXES

SEQ ID NO: 815 - protein, 14 aa, synthetic construct
  SITE 1: note = N-term Acetic Acid
  SITE 1: note = (R)-2-allylpyrrolidine-2-carboxylic acid, useful for stapling/stapled with another amino acid residue comprising an olefin group to form a staple through the olefin group
  SITE 3: note = (S)-2-amino-3,3-diphenylpropanoic acid
  VARIANT 4: note = 2-amino-2-(pent-4-en-1-yl)hept-6-enoic acid, useful for stapling/stapled with another amino acid residue comprising an olefin group to form a staple through one of the two olefin groups and/or with another amino acid residue comprising an olefin group to form a staple through the other of the two olefin groups
  SITE 6: note = (S)-3-(2-amino-2-carboxyethyl)benzoic acid
  SITE 10: note = L-lysine, useful for stapling/stapled with another amino acid residue comprising a side chain acid group to form a staple through the 6-amino group
  SITE 11: note (S)-3-amino-1-((pent-4-en-1-yloxy)carbonyl)pyrrolidine-3-ca rboxylic acid, useful for stapling/stapled with another amino acid residue comprising an olefin group to form a staple through the olefin group
  SITE 12: note = (S)-2-amino-3-(thiophen-3-yl)propanoic acid
  SITE 13: note = (S)-2-amino-3-(3,4-dichlorophenyl)propanoic acid
  SITE 14: note = L-glutamic acid, useful for stapling/stapled with another amino acid residue comprising a side chain amino group to form a staple through the 4-carboxyl group
  SITE 14: note = C-term amino
XDXXDXFAFKXXXE

SEQ ID NO: 816 - protein, 15 aa, synthetic construct
  SITE 1: note = N-term Acetic Acid
  SITE 1: note = (R)-2-allylpyrrolidine-2-carboxylic acid, useful for stapling/stapled with another amino acid residue comprising an olefin group to form a staple through the olefin group
  SITE 3: note = (S)-2-amino-3,3-diphenylpropanoic acid
  VARIANT 4: note = 2-amino-2-(pent-4-en-1-yl)hept-6-enoic acid, useful for stapling/stapled with another amino acid residue comprising an olefin group to form a staple through one of the two olefin groups and/or with another amino acid residue comprising an olefin group to form a staple through the other of the two olefin groups
  SITE 6: note = (S)-3-(2-amino-2-carboxyethyl)benzoic acid
  SITE 10: note = L-lysine, useful for stapling/stapled with another amino acid residue comprising a side chain acid group to form a staple through the 6-amino group
  SITE 11: note (S)-3-amino-1-((pent-4-en-1-yloxy)carbonyl)pyrrolidine-3-ca rboxylic acid, useful for stapling/stapled with another amino acid residue comprising an olefin group to form a staple through the olefin group
  SITE 12: note = (S)-2-amino-3-(thiophen-3-yl)propanoic acid
  SITE 13: note = (S)-2-amino-3-(3,4-dichlorophenyl)propanoic acid
  SITE 14: note = L-glutamic acid, useful for stapling/stapled with another amino acid residue comprising a side chain amino group to form a staple through the 4-carboxyl group
  SITE 15: note = C-term amino
XDXXDXFAFKXXXEA

SEQ ID NO: 817 - protein, 15 aa, synthetic construct
  SITE 1: note = N-term Acetic Acid
  SITE 1: note = (R)-2-allylpyrrolidine-2-carboxylic acid, useful for stapling/stapled with another amino acid residue comprising an olefin group to form a staple through the olefin group
  SITE 3: note = (S)-2-amino-3,3-diphenylpropanoic acid
  VARIANT 4: note = 2-amino-2-(pent-4-en-1-yl)hept-6-enoic acid, useful for stapling/stapled with another amino acid residue comprising an olefin group to form a staple through one of the two olefin groups and/or with another amino acid residue comprising an olefin group to form a staple through the other of the two olefin groups
  SITE 6: note = (S)-3-(2-amino-2-carboxyethyl)benzoic acid
  SITE 10: note = L-lysine, useful for stapling/stapled with another amino acid residue comprising a side chain acid group to form a staple through the 6-amino group
  SITE 11: note (S)-3-amino-1-((pent-4-en-1-yloxy)carbonyl)pyrrolidine-3-ca rboxylic acid, useful for stapling/stapled with another amino acid residue comprising an olefin group to form a staple through the olefin group
  SITE 12: note = (S)-2-amino-3-(thiophen-3-yl)propanoic acid
  SITE 13: note = (S)-2-amino-3-(3,4-dichlorophenyl)propanoic acid
  SITE 14: note = L-glutamic acid, useful for stapling/stapled with another amino acid residue comprising a side chain amino group to form a staple through the 4-carboxyl group
  SITE 15: note = C-term amino
XDXXDXFAFKXXXES

SEQ ID NO: 818 - protein, 14 aa, synthetic construct
  SITE 1: note = N-term Acetic Acid
  SITE 1: note = (R)-2-allylpyrrolidine-2-carboxylic acid, useful for stapling/stapled with another amino acid residue comprising an olefin group to form a staple through the olefin group
  SITE 3: note = (S)-2-amino-3,3-diphenylpropanoic acid
  VARIANT 4: note = 2-amino-2-(pent-4-en-1-yl)hept-6-enoic acid, useful for stapling/stapled with another amino acid residue comprising an olefin group to form a staple through one of the two olefin groups and/or with another amino acid residue comprising an olefin group to form a staple through the other of the two olefin groups
  SITE 6: note = (S)-3-(2-amino-2-carboxyethyl)benzoic acid
  SITE 7: note = 1-aminocyclopentane-1-carboxylic acid
  SITE 10: note = L-lysine, useful for stapling/stapled with another amino acid residue comprising a side chain acid group to form a staple through the 6-amino group
  SITE 11: note (S)-3-amino-1-((pent-4-en-1-yloxy)carbonyl)pyrrolidine-3-ca rboxylic acid, useful for stapling/stapled with another amino acid residue comprising an olefin group to form a staple through the olefin group
  SITE 12: note = (S)-2-amino-3-(thiophen-3-yl)propanoic acid
  SITE 13: note = (S)-2-amino-3-(3,4-dichlorophenyl)propanoic acid
  SITE 14: note = L-glutamic acid, useful for stapling/stapled with another amino acid residue comprising a side chain amino group to form a staple through the 4-carboxyl group
  SITE 14: note = C-term amino
XDXXDXXAFKXXXE

SEQ ID NO: 819 - protein, 15 aa, synthetic construct
  SITE 1: note = N-term Acetic Acid
  SITE 1: note = (R)-2-allylpyrrolidine-2-carboxylic acid, useful for stapling/stapled with another amino acid residue comprising an olefin group to form a staple through the olefin group
  SITE 3: note = (S)-2-amino-3,3-diphenylpropanoic acid
  VARIANT 4: note = 2-amino-2-(pent-4-en-1-yl)hept-6-enoic acid, useful for stapling/stapled with another amino acid residue comprising an olefin group to form a staple through one of the two olefin groups and/or with another amino acid residue comprising an olefin group to form a staple through the other of the two olefin groups
  SITE 6: note = (S)-3-(2-amino-2-carboxyethyl)benzoic acid
  SITE 7: note = 1-aminocyclopentane-1-carboxylic acid
  SITE 10: note = L-lysine, useful for stapling/stapled with another amino acid residue comprising a side chain acid group to form a staple through the 6-amino group
  SITE 11: note (S)-3-amino-1-((pent-4-en-1-yloxy)carbonyl)pyrrolidine-3-ca rboxylic acid, useful for stapling/stapled with another amino acid residue comprising an olefin group to form a staple through the olefin group
  SITE 12: note = (S)-2-amino-3-(thiophen-3-yl)propanoic acid
  SITE 13: note = (S)-2-amino-3-(3,4-dichlorophenyl)propanoic acid
  SITE 14: note = L-glutamic acid, useful for stapling/stapled with another amino acid residue comprising a side chain amino group to form a staple through the 4-carboxyl group
  SITE 15: note = C-term amino
XDXXDXXAFKXXXEA

SEQ ID NO: 820 - protein, 15 aa, synthetic construct
  SITE 1: note = N-term Acetic Acid
  SITE 1: note = (R)-2-allylpyrrolidine-2-carboxylic acid, useful for stapling/stapled with another amino acid residue comprising an olefin group to form a staple through the olefin group
  SITE 3: note = (S)-2-amino-3,3-diphenylpropanoic acid
  VARIANT 4: note = 2-amino-2-(pent-4-en-1-yl)hept-6-enoic acid, useful for stapling/stapled with another amino acid residue comprising an olefin group to form a staple through one of the two olefin groups and/or with another amino acid residue comprising an olefin group to form a staple through the other of the two olefin groups
  SITE 6: note = (S)-3-(2-amino-2-carboxyethyl)benzoic acid
  SITE 7: note = 1-aminocyclopentane-1-carboxylic acid
  SITE 10: note = L-lysine, useful for stapling/stapled with another amino acid residue comprising a side chain acid group to form a staple through the 6-amino group
  SITE 11: note (S)-3-amino-1-((pent-4-en-1-yloxy)carbonyl)pyrrolidine-3-ca rboxylic acid, useful for stapling/stapled with another amino acid residue comprising an olefin group to form a staple through the olefin group
  SITE 12: note = (S)-2-amino-3-(thiophen-3-yl)propanoic acid
  SITE 13: note = (S)-2-amino-3-(3,4-dichlorophenyl)propanoic acid
  SITE 14: note = L-glutamic acid, useful for stapling/stapled with another amino acid residue comprising a side chain amino group to form a staple through the 4-carboxyl group
  SITE 15: note = C-term amino
XDXXDXXAFKXXXES

SEQ ID NO: 821 - protein, 15 aa, synthetic construct
  SITE 1: note = N-term Acetic Acid
  SITE 1: note = (R)-2-allylpyrrolidine-2-carboxylic acid, useful for stapling/stapled with another amino acid residue comprising an olefin group to form a staple through the olefin group
  SITE 3: note = (S)-2-amino-4,4-dimethylpentanoic acid
  VARIANT 4: note = 2-amino-2-(pent-4-en-1-yl)hept-6-enoic acid, useful for stapling/stapled with another amino acid residue comprising an olefin group to form a staple through one of the two olefin groups and/or with another amino acid residue comprising an olefin group to form a staple through the other of the two olefin groups
  SITE 6: note = (S)-3-(2-amino-2-carboxyethyl)benzoic acid
  SITE 7: note = 2-amino-2-methylpropanoic acid
  SITE 10: note = (S)-2-amino-6-(1H-1,2,3-triazol-1-yl)hexanoic acid, useful for stapling/stapled with another amino acid residue to form a staple through the 4-position of the triazolyl group
  SITE 11: note (S)-3-amino-1-((2S,3R)-3-methoxy-2-methylhept-6-enoyl) pyrrolidine-3-carboxylic acid, useful for stapling/stapled with another amino acid residue comprising an olefin group to form a staple through the olefin group
  SITE 12: note = (S)-2-amino-3-(thiophen-3-yl)propanoic acid
  SITE 13: note = (S)-2-amino-3-(benzo[b]thiophen-3-yl)propanoic acid
  SITE 14: note = L-alanine, useful for stapling/stapled with another amino acid residue comprising a triazolyl group to form a staple through the terminal methyl group
  SITE 15: note = C-term amino
XDXXDXXAFXXXXAA

SEQ ID NO: 822 - protein, 15 aa, synthetic construct
  SITE 1: note = N-term Acetic Acid
  SITE 1: note = (R)-2-allylpyrrolidine-2-carboxylic acid, useful for stapling/stapled with another amino acid residue comprising an olefin group to form a staple through the olefin group
  SITE 3: note = (S)-2-amino-4,4-dimethylpentanoic acid
  VARIANT 4: note = 2-amino-2-(pent-4-en-1-yl)hept-6-enoic acid, useful for stapling/stapled with another amino acid residue comprising an olefin group to form a staple through one of the two olefin groups and/or with another amino acid residue comprising an olefin group to form a staple through the other of the two olefin groups
  SITE 6: note = (S)-3-(2-amino-2-carboxyethyl)benzoic acid
  SITE 7: note = 2-amino-2-methylpropanoic acid
  SITE 10: note = (S)-2-amino-6-(1H-1,2,3-triazol-1-yl)hexanoic acid, useful for stapling/stapled with another amino acid residue to form a staple through the 4-position of the triazolyl group
  SITE 11: note (S)-3-amino-1-((2R,3S)-3-methoxy-2-methylhept-6-enoyl) pyrrolidine-3-carboxylic acid, useful for stapling/stapled with another amino acid residue comprising an olefin group to form a staple through the olefin group
  SITE 12: note = (S)-2-amino-3-(thiophen-3-yl)propanoic acid
  SITE 13: note = (S)-2-amino-3-(benzo[b]thiophen-3-yl)propanoic acid
  SITE 14: note = L-alanine, useful for stapling/stapled with another amino acid residue comprising a triazolyl group to form a staple through the terminal methyl group
  SITE 15: note = C-term amino
XDXXDXXAFXXXXAA

SEQ ID NO: 823 - protein, 15 aa, synthetic construct
  SITE 1: note = N-term Acetic Acid
  SITE 1: note = (R)-2-allylpyrrolidine-2-carboxylic acid, useful for stapling/stapled with another amino acid residue comprising an olefin group to form a staple through the olefin group
  SITE 3: note = (S)-2-amino-4,4-dimethylpentanoic acid
  VARIANT 4: note = 2-amino-2-(pent-4-en-1-yl)hept-6-enoic acid, useful for stapling/stapled with another amino acid residue comprising an olefin group to form a staple through one of the two olefin groups and/or with another amino acid residue comprising an olefin group to form a staple through the other of the two olefin groups
  SITE 6: note = (S)-3-(2-amino-2-carboxyethyl)benzoic acid
  SITE 7: note = 2-amino-2-methylpropanoic acid
  SITE 10: note = (S)-2-amino-6-(1H-1,2,3-triazol-1-yl)hexanoic acid, useful for stapling/stapled with another amino acid residue to form a staple through the 4-position of the triazolyl group
  SITE 11: note (S)-3-amino-1-(3-(((R)-but-3-en-2-yl)oxy)propanoyl)pyrrolid ine -3-carboxylic acid, useful for stapling/stapled with another amino acid residue comprising an olefin group to form a staple through the olefin group
  SITE 12: note = (S)-2-amino-3-(thiophen-3-yl)propanoic acid
  SITE 13: note = (S)-2-amino-3-(benzo[b]thiophen-3-yl)propanoic acid
  SITE 14: note = L-alanine, useful for stapling/stapled with another amino acid residue comprising a triazolyl group to form a staple through the terminal methyl group
  SITE 15: note = C-term amino
XDXXDXXAFXXXXAA

SEQ ID NO: 824 - protein, 15 aa, synthetic construct
  SITE 1: note = N-term Acetic Acid
  SITE 1: note = (R)-2-allylpyrrolidine-2-carboxylic acid, useful for stapling/stapled with another amino acid residue comprising an olefin group to form a staple through the olefin group
  SITE 3: note = (S)-2-amino-4,4-dimethylpentanoic acid
  VARIANT 4: note = 2-amino-2-(pent-4-en-1-yl)hept-6-enoic acid, useful for stapling/stapled with another amino acid residue comprising an olefin group to form a staple through one of the two olefin groups and/or with another amino acid residue comprising an olefin group to form a staple through the other of the two olefin groups
  SITE 6: note = (S)-3-(2-amino-2-carboxyethyl)benzoic acid
  SITE 7: note = 2-amino-2-methylpropanoic acid
  SITE 10: note = (S)-2-amino-6-(1H-1,2,3-triazol-1-yl)hexanoic acid, useful for stapling/stapled with another amino acid residue to form a staple through the 4-position of the triazolyl group
  SITE 11: note (S)-3-amino-1-(3-(((S)-but-3-en-2-yl)oxy)propanoyl)pyrrolid ine -3-carboxylic acid, useful for stapling/stapled with another amino acid residue comprising an olefin group to form a staple through the olefin group
  SITE 12: note = (S)-2-amino-3-(thiophen-3-yl)propanoic acid
  SITE 13: note = (S)-2-amino-3-(benzo[b]thiophen-3-yl)propanoic acid
  SITE 14: note = L-alanine, useful for stapling/stapled with another amino acid residue comprising a triazolyl group to form a staple through the terminal methyl group
  SITE 15: note = C-term amino
XDXXDXXAFXXXXAA

SEQ ID NO: 825 - protein, 15 aa, synthetic construct
  SITE 1: note = N-term Acetic Acid
  SITE 1: note = (R)-2-allylpyrrolidine-2-carboxylic acid, useful for stapling/stapled with another amino acid residue comprising an olefin group to form a staple through the olefin group
  SITE 3: note = (S)-2-amino-4,4-dimethylpentanoic acid
  VARIANT 4: note = 2-amino-2-(pent-4-en-1-yl)hept-6-enoic acid, useful for stapling/stapled with another amino acid residue comprising an olefin group to form a staple through one of the two olefin groups and/or with another amino acid residue comprising an olefin group to form a staple through the other of the two olefin groups
  SITE 6: note = (S)-3-(2-amino-2-carboxyethyl)benzoic acid
  SITE 7: note = 2-amino-2-methylpropanoic acid
  SITE 10: note = (S)-2-amino-6-(1H-1,2,3-triazol-1-yl)hexanoic acid, useful for stapling/stapled with another amino acid residue to form a staple through the 4-position of the triazolyl group
  SITE 11: note (S)-3-amino-1-(3,3-dimethylhept-6-enoyl)pyrrolidine-3-carbo xylic acid, useful for stapling/stapled with another amino acid residue comprising an olefin group to form a staple through the olefin group
  SITE 12: note = (S)-2-amino-3-(thiophen-3-yl)propanoic acid
  SITE 13: note = (S)-2-amino-3-(benzo[b]thiophen-3-yl)propanoic acid
  SITE 14: note = L-alanine, useful for stapling/stapled with another amino acid residue comprising a triazolyl group to form a staple through the terminal methyl group
  SITE 15: note = C-term amino
XDXXDXXAFXXXXAA

SEQ ID NO: 826 - protein, 15 aa, synthetic construct
  SITE 1: note = N-term Acetic Acid
  SITE 1: note = (R)-2-allylpyrrolidine-2-carboxylic acid, useful for stapling/stapled with another amino acid residue comprising an olefin group to form a staple through the olefin group
  SITE 3: note = (S)-2-amino-4,4-dimethylpentanoic acid
  VARIANT 4: note = 2-amino-2-(pent-4-en-1-yl)hept-6-enoic acid, useful for stapling/stapled with another amino acid residue comprising an olefin group to form a staple through one of the two olefin groups and/or with another amino acid residue comprising an olefin group to form a staple through the other of the two olefin groups
  SITE 6: note = (S)-3-(2-amino-2-carboxyethyl)benzoic acid
  SITE 7: note = 2-amino-2-methylpropanoic acid
  SITE 10: note = (S)-2-amino-6-(1H-1,2,3-triazol-1-yl)hexanoic acid, useful for stapling/stapled with another amino acid residue to form a staple through the 4-position of the triazolyl group
  SITE 11: note = (S)-3-amino-1-(hept-6-enoyl)pyrrolidine-3-carboxylic acid, useful for stapling/stapled with another amino acid residue comprising an olefin group to form a staple through the olefin group
  SITE 12: note = (S)-2-amino-3-(thiophen-3-yl)propanoic acid
  SITE 13: note = (S)-2-amino-3-(benzo[b]thiophen-3-yl)propanoic acid
  SITE 14: note = L-alanine, useful for stapling/stapled with another amino acid residue comprising a triazolyl group to form a staple through the terminal methyl group
  SITE 15: note = C-term amino
XDXXDXXAFXXXXAA

SEQ ID NO: 827 - protein, 15 aa, synthetic construct
  SITE 1: note = N-term Acetic Acid
  SITE 1: note = (R)-2-allylpyrrolidine-2-carboxylic acid, useful for stapling/stapled with another amino acid residue comprising an olefin group to form a staple through the olefin group
  SITE 3: note = (S)-2-amino-4,4-dimethylpentanoic acid
  VARIANT 4: note = 2-amino-2-(pent-4-en-1-yl)hept-6-enoic acid, useful for stapling/stapled with another amino acid residue comprising an olefin group to form a staple through one of the two olefin groups and/or with another amino acid residue comprising an olefin group to form a staple through the other of the two olefin groups
  SITE 6: note = (S)-3-(2-amino-2-carboxyethyl)benzoic acid
  SITE 7: note = 2-amino-2-methylpropanoic acid
  SITE 10: note = (S)-2-amino-6-(1H-1,2,3-triazol-1-yl)hexanoic acid, useful for stapling/stapled with another amino acid residue to form a staple through the 4-position of the triazolyl group
  SITE 11: note (S)-3-amino-1-(but-3-enoyl-L-alanyl)pyrrolidine-3-carboxyli c acid, useful for stapling/stapled with another amino acid residue comprising an olefin group to form a staple through the olefin group
  SITE 12: note = (S)-2-amino-3-(thiophen-3-yl)propanoic acid
  SITE 13: note = (S)-2-amino-3-(benzo[b]thiophen-3-yl)propanoic acid
  SITE 14: note = L-alanine, useful for stapling/stapled with another amino acid residue comprising a triazolyl group to form a staple through the terminal methyl group
  SITE 15: note = C-term amino
XDXXDXXAFXXXXAA

SEQ ID NO: 828 - protein, 15 aa, synthetic construct
  SITE 1: note = N-term Acetic Acid
  SITE 1: note = (R)-2-allylpyrrolidine-2-carboxylic acid, useful for stapling/stapled with another amino acid residue comprising an olefin group to form a staple through the olefin group
  SITE 3: note = (S)-2-amino-4,4-dimethylpentanoic acid
  VARIANT 4: note = 2-amino-2-(pent-4-en-1-yl)hept-6-enoic acid, useful for stapling/stapled with another amino acid residue comprising an olefin group to form a staple through one of the two olefin groups and/or with another amino acid residue comprising an olefin group to form a staple through the other of the two olefin groups
  SITE 6: note = (S)-3-(2-amino-2-carboxyethyl)benzoic acid
  SITE 7: note = 2-amino-2-methylpropanoic acid
  SITE 10: note = (S)-2-amino-6-(1H-1,2,3-triazol-1-yl)hexanoic acid, useful for stapling/stapled with another amino acid residue to form a staple through the 4-position of the triazolyl group
  SITE 11: note (S)-3-amino-1-(but-3-enoyl-D-alanyl)pyrrolidine-3-carboxyli c acid, useful for stapling/stapled with another amino acid residue comprising an olefin group to form a staple through the olefin group
  SITE 12: note = (S)-2-amino-3-(thiophen-3-yl)propanoic acid
  SITE 13: note = (S)-2-amino-3-(benzo[b]thiophen-3-yl)propanoic acid
  SITE 14: note = L-alanine, useful for stapling/stapled with another amino acid residue comprising a triazolyl group to form a staple through the terminal methyl group
  SITE 15: note = C-term amino
XDXXDXXAFXXXXAA

SEQ ID NO: 829 - protein, 16 aa, synthetic construct
  SITE 1: note = N-term Acetic Acid
  SITE 1: note = (S)-2-amino-2-methylhept-6-enoic acid, useful for stapling/stapled with another amino acid residue comprising an olefin group to form a staple through the olefin group
  SITE 4: note = (S)-2-amino-4,4-dimethylpentanoic acid
  VARIANT 5: note = 2-amino-2-(pent-4-en-1-yl)hept-6-enoic acid, useful for stapling/stapled with another amino acid residue comprising an olefin group to form a staple through one of the two olefin groups and/or with another amino acid residue comprising an olefin group to form a staple through the other of the two olefin groups
  SITE 7: note = (S)-3-(2-amino-2-carboxyethyl)benzoic acid
  SITE 8: note = 2-amino-2-methylpropanoic acid
  SITE 11: note = L-lysine, useful for stapling/stapled with another amino acid residue comprising a side chain acid group to form a staple through the 6-amino group
  SITE 12: note (S)-3-amino-1-((pent-4-en-1-yloxy)carbonyl)pyrrolidine-3-ca rboxylic acid, useful for stapling/stapled with another amino acid residue comprising an olefin group to form a staple through the olefin group
  SITE 13: note = (S)-2-amino-3-(thiophen-3-yl)propanoic acid
  SITE 14: note = (S)-2-amino-3-(benzo[b]thiophen-3-yl)propanoic acid
  SITE 15: note = L-glutamic acid, useful for stapling/stapled with another amino acid residue comprising a side chain amino group to form a staple through the 4-carboxyl group
  SITE 16: note = C-term amino
XSDXXDXXAFKXXXEA

SEQ ID NO: 830 - protein, 16 aa, synthetic construct
  SITE 1: note = N-term Acetic Acid
  SITE 1: note = (S)-2-amino-2-methylhept-6-enoic acid, useful for stapling/stapled with another amino acid residue comprising an olefin group to form a staple through the olefin group
  SITE 4: note = (S)-2-amino-4,4-dimethylpentanoic acid
  VARIANT 5: note = 2-amino-2-(pent-4-en-1-yl)hept-6-enoic acid, useful for stapling/stapled with another amino acid residue comprising an olefin group to form a staple through one of the two olefin groups and/or with another amino acid residue comprising an olefin group to form a staple through the other of the two olefin groups
  SITE 7: note = (S)-3-(2-amino-2-carboxyethyl)benzoic acid
  SITE 8: note = 2-amino-2-methylpropanoic acid
  SITE 11: note = L-lysine, useful for stapling/stapled with another amino acid residue comprising a side chain acid group to form a staple through the 6-amino group
  SITE 12: note (S)-3-amino-1-((pent-4-en-1-yloxy)carbonyl)pyrrolidine-3-ca rboxylic acid, useful for stapling/stapled with another amino acid residue comprising an olefin group to form a staple through the olefin group
  SITE 13: note = (S)-2-amino-3-(thiophen-3-yl)propanoic acid
  SITE 14: note = (S)-2-amino-3-(benzo[b]thiophen-3-yl)propanoic acid
  SITE 15: note = L-glutamic acid, useful for stapling/stapled with another amino acid residue comprising a side chain amino group to form a staple through the 4-carboxyl group
  SITE 16: note = C-term amino
XVDXXDXXAFKXXXEA

SEQ ID NO: 831 - protein, 16 aa, synthetic construct
  SITE 1: note = N-term Acetic Acid
  SITE 1: note = (S)-2-amino-2-methylhept-6-enoic acid, useful for stapling/stapled with another amino acid residue comprising an olefin group to form a staple through the olefin group
  SITE 4: note = (S)-2-amino-4,4-dimethylpentanoic acid
  VARIANT 5: note = 2-amino-2-(pent-4-en-1-yl)hept-6-enoic acid, useful for stapling/stapled with another amino acid residue comprising an olefin group to form a staple through one of the two olefin groups and/or with another amino acid residue comprising an olefin group to form a staple through the other of the two olefin groups
  SITE 7: note = (S)-3-(2-amino-2-carboxyethyl)benzoic acid
  SITE 8: note = 2-amino-2-methylpropanoic acid
  SITE 11: note = L-lysine, useful for stapling/stapled with another amino acid residue comprising a side chain acid group to form a staple through the 6-amino group
  SITE 12: note (S)-3-amino-1-((pent-4-en-1-yloxy)carbonyl)pyrrolidine-3-ca rboxylic acid, useful for stapling/stapled with another amino acid residue comprising an olefin group to form a staple through the olefin group
  SITE 13: note = (S)-2-amino-3-(thiophen-3-yl)propanoic acid
  SITE 14: note = (S)-2-amino-3-(benzo[b]thiophen-3-yl)propanoic acid
  SITE 15: note = L-glutamic acid, useful for stapling/stapled with another amino acid residue comprising a side chain amino group to form a staple through the 4-carboxyl group
  SITE 16: note = C-term amino
XLDXXDXXAFKXXXEA

SEQ ID NO: 832 - protein, 16 aa, synthetic construct
  SITE 1: note = N-term Acetic Acid
  SITE 1: note = (S)-2-amino-2-methylhept-6-enoic acid, useful for stapling/stapled with another amino acid residue comprising an olefin group to form a staple through the olefin group
  SITE 4: note = (S)-2-amino-4,4-dimethylpentanoic acid
  VARIANT 5: note = 2-amino-2-(pent-4-en-1-yl)hept-6-enoic acid, useful for stapling/stapled with another amino acid residue comprising an olefin group to form a staple through one of the two olefin groups and/or with another amino acid residue comprising an olefin group to form a staple through the other of the two olefin groups
  SITE 7: note = (S)-3-(2-amino-2-carboxyethyl)benzoic acid
  SITE 8: note = 2-amino-2-methylpropanoic acid
  SITE 11: note = L-lysine, useful for stapling/stapled with another amino acid residue comprising a side chain acid group to form a staple through the 6-amino group
  SITE 12: note (S)-3-amino-1-((pent-4-en-1-yloxy)carbonyl)pyrrolidine-3-ca rboxylic acid, useful for stapling/stapled with another amino acid residue comprising an olefin group to form a staple through the olefin group
  SITE 13: note = (S)-2-amino-3-(thiophen-3-yl)propanoic acid
  SITE 14: note = (S)-2-amino-3-(benzo[b]thiophen-3-yl)propanoic acid
  SITE 15: note = L-glutamic acid, useful for stapling/stapled with another amino acid residue comprising a side chain amino group to form a staple through the 4-carboxyl group
  SITE 16: note = C-term amino
XTDXXDXXAFKXXXEA

SEQ ID NO: 833 - protein, 16 aa, synthetic construct
  SITE 1: note = N-term Acetic Acid
  SITE 1: note = (S)-2-amino-2-methylhept-6-enoic acid, useful for stapling/stapled with another amino acid residue comprising an olefin group to form a staple through the olefin group
  SITE 4: note = (S)-2-amino-4,4-dimethylpentanoic acid
  VARIANT 5: note = 2-amino-2-(pent-4-en-1-yl)hept-6-enoic acid, useful for stapling/stapled with another amino acid residue comprising an olefin group to form a staple through one of the two olefin groups and/or with another amino acid residue comprising an olefin group to form a staple through the other of the two olefin groups
  SITE 7: note = (S)-3-(2-amino-2-carboxyethyl)benzoic acid
  SITE 8: note = 2-amino-2-methylpropanoic acid
  SITE 11: note = L-lysine, useful for stapling/stapled with another amino acid residue comprising a side chain acid group to form a staple through the 6-amino group
  SITE 12: note (S)-3-amino-1-((pent-4-en-1-yloxy)carbonyl)pyrrolidine-3-ca rboxylic acid, useful for stapling/stapled with another amino acid residue comprising an olefin group to form a staple through the olefin group
  SITE 13: note = (S)-2-amino-3-(thiophen-3-yl)propanoic acid
  SITE 14: note = (S)-2-amino-3-(benzo[b]thiophen-3-yl)propanoic acid
  SITE 15: note = L-glutamic acid, useful for stapling/stapled with another amino acid residue comprising a side chain amino group to form a staple through the 4-carboxyl group
  SITE 16: note = C-term amino
XFDXXDXXAFKXXXEA

SEQ ID NO: 834 - protein, 17 aa, synthetic construct
  SITE 1: note = N-term Acetic Acid
  SITE 2: note = (S)-2-amino-2-methylhept-6-enoic acid, useful for stapling/stapled with another amino acid residue comprising an olefin group to form a staple through the olefin group
  SITE 5: note = (S)-2-amino-4,4-dimethylpentanoic acid
  VARIANT 6: note = 2-amino-2-(pent-4-en-1-yl)hept-6-enoic acid, useful for stapling/stapled with another amino acid residue comprising an olefin group to form a staple through one of the two olefin groups and/or with another amino acid residue comprising an olefin group to form a staple through the other of the two olefin groups
  SITE 8: note = (S)-3-(2-amino-2-carboxyethyl)benzoic acid
  SITE 9: note = 2-amino-2-methylpropanoic acid
  SITE 12: note = L-lysine, useful for stapling/stapled with another amino acid residue comprising a side chain acid group to form a staple through the 6-amino group
  SITE 13: note (S)-3-amino-1-((pent-4-en-1-yloxy)carbonyl)pyrrolidine-3-ca rboxylic acid, useful for stapling/stapled with another amino acid residue comprising an olefin group to form a staple through the olefin group
  SITE 14: note = (S)-2-amino-3-(thiophen-3-yl)propanoic acid
  SITE 15: note = (S)-2-amino-3-(benzo[b]thiophen-3-yl)propanoic acid
  SITE 16: note = L-glutamic acid, useful for stapling/stapled with another amino acid residue comprising a side chain amino group to form a staple through the 4-carboxyl group
  SITE 17: note = C-term amino
PXADXXDXXAFKXXXEA

SEQ ID NO: 835 - protein, 17 aa, synthetic construct
  SITE 1: note = N-term Acetic Acid
  SITE 2: note = (S)-2-amino-2-methylhept-6-enoic acid, useful for stapling/stapled with another amino acid residue comprising an olefin group to form a staple through the olefin group
  SITE 5: note = (S)-2-amino-4,4-dimethylpentanoic acid
  VARIANT 6: note = 2-amino-2-(pent-4-en-1-yl)hept-6-enoic acid, useful for stapling/stapled with another amino acid residue comprising an olefin group to form a staple through one of the two olefin groups and/or with another amino acid residue comprising an olefin group to form a staple through the other of the two olefin groups
  SITE 8: note = (S)-3-(2-amino-2-carboxyethyl)benzoic acid
  SITE 9: note = 2-amino-2-methylpropanoic acid
  SITE 12: note = L-lysine, useful for stapling/stapled with another amino acid residue comprising a side chain acid group to form a staple through the 6-amino group
  SITE 13: note (S)-3-amino-1-((pent-4-en-1-yloxy)carbonyl)pyrrolidine-3-ca rboxylic acid, useful for stapling/stapled with another amino acid residue comprising an olefin group to form a staple through the olefin group
  SITE 14: note = (S)-2-amino-3-(thiophen-3-yl)propanoic acid
  SITE 15: note = (S)-2-amino-3-(benzo[b]thiophen-3-yl)propanoic acid
  SITE 16: note = L-glutamic acid, useful for stapling/stapled with another amino acid residue comprising a side chain amino group to form a staple through the 4-carboxyl group
  SITE 17: note = C-term amino
SXADXXDXXAFKXXXEA

SEQ ID NO: 836 - protein, 17 aa, synthetic construct
  SITE 1: note = N-term Acetic Acid
  SITE 2: note = (S)-2-amino-2-methylhept-6-enoic acid, useful for stapling/stapled with another amino acid residue comprising an olefin group to form a staple through the olefin group
  SITE 5: note = (S)-2-amino-4,4-dimethylpentanoic acid
  VARIANT 6: note = 2-amino-2-(pent-4-en-1-yl)hept-6-enoic acid, useful for stapling/stapled with another amino acid residue comprising an olefin group to form a staple through one of the two olefin groups and/or with another amino acid residue comprising an olefin group to form a staple through the other of the two olefin groups
  SITE 8: note = (S)-3-(2-amino-2-carboxyethyl)benzoic acid
  SITE 9: note = 2-amino-2-methylpropanoic acid
  SITE 12: note = L-lysine, useful for stapling/stapled with another amino acid residue comprising a side chain acid group to form a staple through the 6-amino group
  SITE 13: note (S)-3-amino-1-((pent-4-en-1-yloxy)carbonyl)pyrrolidine-3-ca rboxylic acid, useful for stapling/stapled with another amino acid residue comprising an olefin group to form a staple through the olefin group
  SITE 14: note = (S)-2-amino-3-(thiophen-3-yl)propanoic acid
  SITE 15: note = (S)-2-amino-3-(benzo[b]thiophen-3-yl)propanoic acid
  SITE 16: note = L-glutamic acid, useful for stapling/stapled with another amino acid residue comprising a side chain amino group to form a staple through the 4-carboxyl group
  SITE 17: note = C-term amino
AXADXXDXXAFKXXXEA

SEQ ID NO: 837 - protein, 15 aa, synthetic construct
  SITE 1: note = N-term Acetic Acid
  SITE 1: note = (R)-2-allylpyrrolidine-2-carboxylic acid, useful for stapling/stapled with another amino acid residue comprising an olefin group to form a staple through the olefin group
  SITE 3: note = (S)-2-amino-4,4-dimethylpentanoic acid
  VARIANT 4: note = 2-amino-2-(pent-4-en-1-yl)hept-6-enoic acid, useful for stapling/stapled with another amino acid residue comprising an olefin group to form a staple through one of the two olefin groups and/or with another amino acid residue comprising an olefin group to form a staple through the other of the two olefin groups
  SITE 6: note = (S)-3-(2-amino-2-carboxyethyl)benzoic acid
  SITE 7: note = 2-amino-2-methylpropanoic acid
  SITE 10: note = L-lysine, useful for stapling/stapled with another amino acid residue comprising a side chain acid group to form a staple through the 6-amino group
  SITE 11: note (S)-3-amino-1-((pent-4-en-1-yloxy)carbonyl)pyrrolidine-3-ca rboxylic acid, useful for stapling/stapled with another amino acid residue comprising an olefin group to form a staple through the olefin group
  SITE 12: note = (S)-2-amino-3-(thiophen-3-yl)propanoic acid
  SITE 13: note = (S)-2-amino-3-(benzo[b]thiophen-3-yl)propanoic acid
  SITE 14: note = L-glutamic acid, useful for stapling/stapled with another amino acid residue comprising a side chain amino group to form a staple through the 4-carboxyl group
  SITE 15: note = C-term amino
XVXXDXXAFKXXXEA

SEQ ID NO: 838 - protein, 15 aa, synthetic construct
  SITE 1: note = N-term Acetic Acid
  SITE 1: note = (R)-2-allylpyrrolidine-2-carboxylic acid, useful for stapling/stapled with another amino acid residue comprising an olefin group to form a staple through the olefin group
  SITE 2: note = (S)-2-amino-4,4-dimethylpentanoic acid
  SITE 3: note = (S)-2-amino-4,4-dimethylpentanoic acid
  VARIANT 4: note = 2-amino-2-(pent-4-en-1-yl)hept-6-enoic acid, useful for stapling/stapled with another amino acid residue comprising an olefin group to form a staple through one of the two olefin groups and/or with another amino acid residue comprising an olefin group to form a staple through the other of the two olefin groups
  SITE 6: note = (S)-3-(2-amino-2-carboxyethyl)benzoic acid
  SITE 7: note = 2-amino-2-methylpropanoic acid
  SITE 10: note = L-lysine, useful for stapling/stapled with another amino acid residue comprising a side chain acid group to form a staple through the 6-amino group
  SITE 11: note (S)-3-amino-1-((pent-4-en-1-yloxy)carbonyl)pyrrolidine-3-ca rboxylic acid, useful for stapling/stapled with another amino acid residue comprising an olefin group to form a staple through the olefin group
  SITE 12: note = (S)-2-amino-3-(thiophen-3-yl)propanoic acid
  SITE 13: note = (S)-2-amino-3-(benzo[b]thiophen-3-yl)propanoic acid
  SITE 14: note = L-glutamic acid, useful for stapling/stapled with another amino acid residue comprising a side chain amino group to form a staple through the 4-carboxyl group
  SITE 15: note = C-term amino
XXXXDXXAFKXXXEA

SEQ ID NO: 839 - protein, 15 aa, synthetic construct
  SITE 1: note = N-term Acetic Acid
  SITE 1: note = (R)-2-allylpyrrolidine-2-carboxylic acid, useful for stapling/stapled with another amino acid residue comprising an olefin group to form a staple through the olefin group
  SITE 2: note = (S)-2-amino-3-(benzo[b]thiophen-3-yl)propanoic acid
  SITE 3: note = (S)-2-amino-4,4-dimethylpentanoic acid
  VARIANT 4: note = 2-amino-2-(pent-4-en-1-yl)hept-6-enoic acid, useful for stapling/stapled with another amino acid residue comprising an olefin group to form a staple through one of the two olefin groups and/or with another amino acid residue comprising an olefin group to form a staple through the other of the two olefin groups
  SITE 6: note = (S)-3-(2-amino-2-carboxyethyl)benzoic acid
  SITE 7: note = 2-amino-2-methylpropanoic acid
  SITE 10: note = L-lysine, useful for stapling/stapled with another amino acid residue comprising a side chain acid group to form a staple through the 6-amino group
  SITE 11: note (S)-3-amino-1-((pent-4-en-1-yloxy)carbonyl)pyrrolidine-3-ca rboxylic acid, useful for stapling/stapled with another amino acid residue comprising an olefin group to form a staple through the olefin group
  SITE 12: note = (S)-2-amino-3-(thiophen-3-yl)propanoic acid
  SITE 13: note = (S)-2-amino-3-(benzo[b]thiophen-3-yl)propanoic acid
  SITE 14: note = L-glutamic acid, useful for stapling/stapled with another amino acid residue comprising a side chain amino group to form a staple through the 4-carboxyl group
  SITE 15: note = C-term amino
XXXXDXXAFKXXXEA

SEQ ID NO: 840 - protein, 21 aa, synthetic construct
  SITE 1: note = N-term Acetic Acid
  SITE 1: note = (R)-2-allylpyrrolidine-2-carboxylic acid, useful for stapling/stapled with another amino acid residue comprising an olefin group to form a staple through the olefin group
  SITE 3: note = (S)-2-amino-4,4-dimethylpentanoic acid
  VARIANT 4: note = 2-amino-2-(pent-4-en-1-yl)hept-6-enoic acid, useful for stapling/stapled with another amino acid residue comprising an olefin group to form a staple through one of the two olefin groups and/or with another amino acid residue comprising an olefin group to form a staple through the other of the two olefin groups
  SITE 6: note = (S)-3-(2-amino-2-carboxyethyl)benzoic acid
  SITE 7: note = 2-amino-2-methylpropanoic acid
  SITE 10: note = L-lysine, useful for stapling/stapled with another amino acid residue comprising a side chain acid group to form a staple through the 6-amino group
  SITE 11: note (S)-3-amino-1-((pent-4-en-1-yloxy)carbonyl)pyrrolidine-3-ca rboxylic acid, useful for stapling/stapled with another amino acid residue comprising an olefin group to form a staple through the olefin group
  SITE 12: note = (S)-2-amino-3-(thiophen-3-yl)propanoic acid
  SITE 13: note = (S)-2-amino-3-(benzo[b]thiophen-3-yl)propanoic acid
  SITE 14: note = L-glutamic acid, useful for stapling/stapled with another amino acid residue comprising a side chain amino group to form a staple through the 4-carboxyl group
  SITE 21: note = C-term amino
XDXXDXXAFKXXXEAARAAAA

SEQ ID NO: 841 - protein, 21 aa, synthetic construct
  SITE 1: note = N-term Acetic Acid
  SITE 1: note = (R)-2-allylpyrrolidine-2-carboxylic acid, useful for stapling/stapled with another amino acid residue comprising an olefin group to form a staple through the olefin group
  SITE 3: note = (S)-2-amino-4,4-dimethylpentanoic acid
  VARIANT 4: note = 2-amino-2-(pent-4-en-1-yl)hept-6-enoic acid, useful for stapling/stapled with another amino acid residue comprising an olefin group to form a staple through one of the two olefin groups and/or with another amino acid residue comprising an olefin group to form a staple through the other of the two olefin groups
  SITE 6: note = (S)-3-(2-amino-2-carboxyethyl)benzoic acid
  SITE 7: note = 2-amino-2-methylpropanoic acid
  SITE 10: note = L-lysine, useful for stapling/stapled with another amino acid residue comprising a side chain acid group to form a staple through the 6-amino group
  SITE 11: note (S)-3-amino-1-((pent-4-en-1-yloxy)carbonyl)pyrrolidine-3-ca rboxylic acid, useful for stapling/stapled with another amino acid residue comprising an olefin group to form a staple through the olefin group
  SITE 12: note = (S)-2-amino-3-(thiophen-3-yl)propanoic acid
  SITE 13: note = (S)-2-amino-3-(benzo[b]thiophen-3-yl)propanoic acid
  SITE 14: note = L-glutamic acid, useful for stapling/stapled with another amino acid residue comprising a side chain amino group to form a staple through the 4-carboxyl group
  SITE 21: note = C-term amino
XDXXDXXAFKXXXEARAAARA

SEQ ID NO: 842 - protein, 21 aa, synthetic construct
  SITE 1: note = N-term Acetic Acid
  SITE 1: note = (R)-2-allylpyrrolidine-2-carboxylic acid, useful for stapling/stapled with another amino acid residue comprising an olefin group to form a staple through the olefin group
  SITE 3: note = (S)-2-amino-4,4-dimethylpentanoic acid
  VARIANT 4: note = 2-amino-2-(pent-4-en-1-yl)hept-6-enoic acid, useful for stapling/stapled with another amino acid residue comprising an olefin group to form a staple through one of the two olefin groups and/or with another amino acid residue comprising an olefin group to form a staple through the other of the two olefin groups
  SITE 6: note = (S)-3-(2-amino-2-carboxyethyl)benzoic acid
  SITE 7: note = 2-amino-2-methylpropanoic acid
  SITE 10: note = L-lysine, useful for stapling/stapled with another amino acid residue comprising a side chain acid group to form a staple through the 6-amino group
  SITE 11: note (S)-3-amino-1-((pent-4-en-1-yloxy)carbonyl)pyrrolidine-3-ca rboxylic acid, useful for stapling/stapled with another amino acid residue comprising an olefin group to form a staple through the olefin group
  SITE 12: note = (S)-2-amino-3-(thiophen-3-yl)propanoic acid
  SITE 13: note = (S)-2-amino-3-(benzo[b]thiophen-3-yl)propanoic acid
  SITE 14: note = L-glutamic acid, useful for stapling/stapled with another amino acid residue comprising a side chain amino group to form a staple through the 4-carboxyl group
  SITE 21: note = C-term amino
XDXXDXXAFKXXXEAARAAAR

SEQ ID NO: 843 - protein, 21 aa, synthetic construct
  SITE 1: note = N-term Acetic Acid
  SITE 1: note = (R)-2-allylpyrrolidine-2-carboxylic acid, useful for stapling/stapled with another amino acid residue comprising an olefin group to form a staple through the olefin group
  SITE 3: note = (S)-2-amino-4,4-dimethylpentanoic acid
  VARIANT 4: note = 2-amino-2-(pent-4-en-1-yl)hept-6-enoic acid, useful for stapling/stapled with another amino acid residue comprising an olefin group to form a staple through one of the two olefin groups and/or with another amino acid residue comprising an olefin group to form a staple through the other of the two olefin groups
  SITE 6: note = (S)-3-(2-amino-2-carboxyethyl)benzoic acid
  SITE 7: note = 2-amino-2-methylpropanoic acid
  SITE 10: note = L-lysine, useful for stapling/stapled with another amino acid residue comprising a side chain acid group to form a staple through the 6-amino group
  SITE 11: note (S)-3-amino-1-((pent-4-en-1-yloxy)carbonyl)pyrrolidine-3-ca rboxylic acid, useful for stapling/stapled with another amino acid residue comprising an olefin group to form a staple through the olefin group
  SITE 12: note = (S)-2-amino-3-(thiophen-3-yl)propanoic acid
  SITE 13: note = (S)-2-amino-3-(benzo[b]thiophen-3-yl)propanoic acid
  SITE 14: note = L-glutamic acid, useful for stapling/stapled with another amino acid residue comprising a side chain amino group to form a staple through the 4-carboxyl group
  SITE 21: note = C-term amino
XDXXDXXAFKXXXEAAKAAAK

SEQ ID NO: 844 - protein, 21 aa, synthetic construct
  SITE 1: note = N-term Acetic Acid
  SITE 1: note = (R)-2-allylpyrrolidine-2-carboxylic acid, useful for stapling/stapled with another amino acid residue comprising an olefin group to form a staple through the olefin group
  SITE 3: note = (S)-2-amino-4,4-dimethylpentanoic acid
  VARIANT 4: note = 2-amino-2-(pent-4-en-1-yl)hept-6-enoic acid, useful for stapling/stapled with another amino acid residue comprising an olefin group to form a staple through one of the two olefin groups and/or with another amino acid residue comprising an olefin group to form a staple through the other of the two olefin groups
  SITE 6: note = (S)-3-(2-amino-2-carboxyethyl)benzoic acid
  SITE 7: note = 2-amino-2-methylpropanoic acid
  SITE 10: note = L-lysine, useful for stapling/stapled with another amino acid residue comprising a side chain acid group to form a staple through the 6-amino group
  SITE 11: note (S)-3-amino-1-((pent-4-en-1-yloxy)carbonyl)pyrrolidine-3-ca rboxylic acid, useful for stapling/stapled with another amino acid residue comprising an olefin group to form a staple through the olefin group
  SITE 12: note = (S)-2-amino-3-(thiophen-3-yl)propanoic acid
  SITE 13: note = (S)-2-amino-3-(benzo[b]thiophen-3-yl)propanoic acid
  SITE 14: note = L-glutamic acid, useful for stapling/stapled with another amino acid residue comprising a side chain amino group to form a staple through the 4-carboxyl group
  SITE 17: note = L-glutamic acid, useful for stapling/stapled with another amino acid residue comprising a side chain amino group to form another staple through the 4-carboxyl group
  SITE 21: note = L-lysine, useful for stapling/stapled with another amino acid residue comprising a side chain acid group to form another staple through the 6-amino group
  SITE 21: note = C-term amino
XDXXDXXAFKXXXEAAEAAAK

SEQ ID NO: 845 - protein, 22 aa, synthetic construct
  SITE 1: note = N-term Acetic Acid
  SITE 1: note = (R)-2-allylpyrrolidine-2-carboxylic acid, useful for stapling/stapled with another amino acid residue comprising an olefin group to form a staple through the olefin group
  SITE 3: note = (S)-2-amino-4,4-dimethylpentanoic acid
  VARIANT 4: note = 2-amino-2-(pent-4-en-1-yl)hept-6-enoic acid, useful for stapling/stapled with another amino acid residue comprising an olefin group to form a staple through one of the two olefin groups and/or with another amino acid residue comprising an olefin group to form a staple through the other of the two olefin groups
  SITE 6: note = (S)-3-(2-amino-2-carboxyethyl)benzoic acid
  SITE 7: note = 2-amino-2-methylpropanoic acid
  SITE 10: note = L-lysine, useful for stapling/stapled with another amino acid residue comprising a side chain acid group to form a staple through the 6-amino group
  SITE 11: note (S)-3-amino-1-((pent-4-en-1-yloxy)carbonyl)pyrrolidine-3-ca rboxylic acid, useful for stapling/stapled with another amino acid residue comprising an olefin group to form a staple through the olefin group
  SITE 12: note = (S)-2-amino-3-(thiophen-3-yl)propanoic acid
  SITE 13: note = (S)-2-amino-3-(benzo[b]thiophen-3-yl)propanoic acid
  SITE 14: note = L-glutamic acid, useful for stapling/stapled with another amino acid residue comprising a side chain amino group to form a staple through the 4-carboxyl group
  SITE 18: note = L-glutamic acid, useful for stapling/stapled with another amino acid residue comprising a side chain amino group to form another staple through the 4-carboxyl group
  SITE 22: note = L-lysine, useful for stapling/stapled with another amino acid residue comprising a side chain acid group to form another staple through the 6-amino group
  SITE 22: note = C-term amino
XDXXDXXAFKXXXEAAAEAAAK

SEQ ID NO: 846 - protein, 15 aa, synthetic construct
  SITE 1: note = N-term Acetic Acid
  SITE 1: note = (R)-2-allylpyrrolidine-2-carboxylic acid, useful for stapling/stapled with another amino acid residue comprising an olefin group to form a staple through the olefin group
  SITE 3: note = (S)-2-amino-4,4-dimethylpentanoic acid
  VARIANT 4: note = 2-amino-2-(pent-4-en-1-yl)hept-6-enoic acid, useful for stapling/stapled with another amino acid residue comprising an olefin group to form a staple through one of the two olefin groups and/or with another amino acid residue comprising an olefin group to form a staple through the other of the two olefin groups
  SITE 6: note = (S)-3-(2-amino-2-carboxyethyl)benzoic acid
  SITE 7: note = 2-amino-2-methylpropanoic acid
  SITE 10: note = L-lysine, useful for stapling/stapled with another amino acid residue comprising a side chain acid group to form a staple through the 6-amino group
  SITE 11: note (S)-3-amino-1-((pent-4-en-1-yloxy)carbonyl)pyrrolidine-3-ca rboxylic acid, useful for stapling/stapled with another amino acid residue comprising an olefin group to form a staple through the olefin group
  SITE 12: note = (1S,2R)-1-amino-2-phenylcyclohexane-1-carboxylic acid
  SITE 13: note = (S)-2-amino-3-(benzo[b]thiophen-3-yl)propanoic acid
  SITE 14: note = L-glutamic acid, useful for stapling/stapled with another amino acid residue comprising a side chain amino group to form a staple through the 4-carboxyl group
  SITE 15: note = C-term amino
XDXXDXXAFKXXXEA

SEQ ID NO: 847 - protein, 14 aa, synthetic construct
  SITE 1: note = N-term Acetic Acid
  SITE 1: note = (R)-2-allylpyrrolidine-2-carboxylic acid, useful for stapling/stapled with another amino acid residue comprising an olefin group to form a staple through the olefin group
  SITE 3: note = (S)-2-amino-4,4-dimethylpentanoic acid
  VARIANT 4: note = 2-amino-2-(pent-4-en-1-yl)hept-6-enoic acid, useful for stapling/stapled with another amino acid residue comprising an olefin group to form a staple through one of the two olefin groups and/or with another amino acid residue comprising an olefin group to form a staple through the other of the two olefin groups
  SITE 6: note = (S)-3-(2-amino-2-carboxyethyl)benzoic acid
  SITE 7: note = 2-amino-2-methylpropanoic acid
  SITE 10: note = L-lysine, useful for stapling/stapled with another amino acid residue comprising a side chain acid group to form a staple through the 6-amino group
  SITE 11: note (S)-3-amino-1-((pent-4-en-1-yloxy)carbonyl)pyrrolidine-3-ca rboxylic acid, useful for stapling/stapled with another amino acid residue comprising an olefin group to form a staple through the olefin group
  SITE 12: note = (S)-2-amino-3-(thiophen-3-yl)propanoic acid
  SITE 13: note = (S)-2-amino-3-(benzo[b]thiophen-3-yl)propanoic acid
  SITE 14: note = L-glutamic acid, useful for stapling/stapled with another amino acid residue comprising a side chain amino group to form a staple through the 4-carboxyl group
  SITE 14: note = C-term amino
XNXXDXXAFKXXXE

SEQ ID NO: 848 - protein, 14 aa, synthetic construct
  SITE 1: note = N-term Acetic Acid
  SITE 1: note = (R)-2-allylpyrrolidine-2-carboxylic acid, useful for stapling/stapled with another amino acid residue comprising an olefin group to form a staple through the olefin group
  SITE 3: note = (S)-2-amino-3,3-diphenylpropanoic acid
  VARIANT 4: note = 2-amino-2-(pent-4-en-1-yl)hept-6-enoic acid, useful for stapling/stapled with another amino acid residue comprising an olefin group to form a staple through one of the two olefin groups and/or with another amino acid residue comprising an olefin group to form a staple through the other of the two olefin groups
  SITE 6: note = (S)-3-(2-amino-2-carboxyethyl)benzoic acid
  SITE 7: note = 2-amino-2-methylpropanoic acid
  SITE 10: note = L-lysine, useful for stapling/stapled with another amino acid residue comprising a side chain acid group to form a staple through the 6-amino group
  SITE 11: note (S)-3-amino-1-((pent-4-en-1-yloxy)carbonyl)pyrrolidine-3-ca rboxylic acid, useful for stapling/stapled with another amino acid residue comprising an olefin group to form a staple through the olefin group
  SITE 12: note = (S)-2-amino-3-(thiophen-3-yl)propanoic acid
  SITE 13: note = (S)-2-amino-3-(benzo[b]thiophen-3-yl)propanoic acid
  SITE 14: note = L-glutamic acid, useful for stapling/stapled with another amino acid residue comprising a side chain amino group to form a staple through the 4-carboxyl group
  SITE 14: note = C-term amino
XNXXDXXAFKXXXE

SEQ ID NO: 849 - protein, 15 aa, synthetic construct
  SITE 1: note = N-term Acetic Acid
  SITE 1: note = (R)-2-allylpyrrolidine-2-carboxylic acid, useful for stapling/stapled with another amino acid residue comprising an olefin group to form a staple through the olefin group
  SITE 3: note = (S)-2-amino-3,3-diphenylpropanoic acid
  VARIANT 4: note = 2-amino-2-(pent-4-en-1-yl)hept-6-enoic acid, useful for stapling/stapled with another amino acid residue comprising an olefin group to form a staple through one of the two olefin groups and/or with another amino acid residue comprising an olefin group to form a staple through the other of the two olefin groups
  SITE 6: note = (S)-3-(2-amino-2-carboxyethyl)benzoic acid
  SITE 7: note = 2-amino-2-methylpropanoic acid
  SITE 10: note = L-lysine, useful for stapling/stapled with another amino acid residue comprising a side chain acid group to form a staple through the 6-amino group
  SITE 11: note (S)-3-amino-1-((pent-4-en-1-yloxy)carbonyl)pyrrolidine-3-ca rboxylic acid, useful for stapling/stapled with another amino acid residue comprising an olefin group to form a staple through the olefin group
  SITE 12: note = (S)-2-amino-3-(thiophen-3-yl)propanoic acid
  SITE 13: note = (S)-2-amino-3-(benzo[b]thiophen-3-yl)propanoic acid
  SITE 14: note = L-glutamic acid, useful for stapling/stapled with another amino acid residue comprising a side chain amino group to form a staple through the 4-carboxyl group
  SITE 15: note = C-term amino
XNXXDXXAFKXXXEA

SEQ ID NO: 850 - protein, 14 aa, synthetic construct
  SITE 1: note = N-term Acetic Acid
  SITE 1: note = (R)-2-allylpyrrolidine-2-carboxylic acid, useful for stapling/stapled with another amino acid residue comprising an olefin group to form a staple through the olefin group
  VARIANT 4: note = 2-amino-2-(pent-4-en-1-yl)hept-6-enoic acid, useful for stapling/stapled with another amino acid residue comprising an olefin group to form a staple through one of the two olefin groups and/or with another amino acid residue comprising an olefin group to form a staple through the other of the two olefin groups
  SITE 6: note = (S)-3-(2-amino-2-carboxyethyl)benzoic acid
  SITE 7: note = 2-amino-2-methylpropanoic acid
  SITE 10: note = L-lysine, useful for stapling/stapled with another amino acid residue comprising a side chain acid group to form a staple through the 6-amino group
  SITE 11: note (S)-3-amino-1-((pent-4-en-1-yloxy)carbonyl)pyrrolidine-3-ca rboxylic acid, useful for stapling/stapled with another amino acid residue comprising an olefin group to form a staple through the olefin group
  SITE 12: note = (S)-2-amino-3-(thiophen-3-yl)propanoic acid
  SITE 13: note = (S)-2-amino-3-(benzo[b]thiophen-3-yl)propanoic acid
  SITE 14: note = L-glutamic acid, useful for stapling/stapled with another amino acid residue comprising a side chain amino group to form a staple through the 4-carboxyl group
  SITE 14: note = C-term amino
XNIXDXXAFKXXXE

SEQ ID NO: 851 - protein, 15 aa, synthetic construct
  SITE 1: note = N-term Acetic Acid
  SITE 1: note = (R)-2-allylpyrrolidine-2-carboxylic acid, useful for stapling/stapled with another amino acid residue comprising an olefin group to form a staple through the olefin group
  VARIANT 4: note = 2-amino-2-(pent-4-en-1-yl)hept-6-enoic acid, useful for stapling/stapled with another amino acid residue comprising an olefin group to form a staple through one of the two olefin groups and/or with another amino acid residue comprising an olefin group to form a staple through the other of the two olefin groups
  SITE 6: note = (S)-3-(2-amino-2-carboxyethyl)benzoic acid
  SITE 7: note = 2-amino-2-methylpropanoic acid
  SITE 10: note = L-lysine, useful for stapling/stapled with another amino acid residue comprising a side chain acid group to form a staple through the 6-amino group
  SITE 11: note (S)-3-amino-1-((pent-4-en-1-yloxy)carbonyl)pyrrolidine-3-ca rboxylic acid, useful for stapling/stapled with another amino acid residue comprising an olefin group to form a staple through the olefin group
  SITE 12: note = (S)-2-amino-3-(thiophen-3-yl)propanoic acid
  SITE 13: note = (S)-2-amino-3-(benzo[b]thiophen-3-yl)propanoic acid
  SITE 14: note = L-glutamic acid, useful for stapling/stapled with another amino acid residue comprising a side chain amino group to form a staple through the 4-carboxyl group
  SITE 15: note = C-term amino
XNIXDXXAFKXXXEA

SEQ ID NO: 852 - protein, 15 aa, synthetic construct
  SITE 1: note = N-term Acetic Acid
  SITE 1: note = (R)-2-allylpyrrolidine-2-carboxylic acid, useful for stapling/stapled with another amino acid residue comprising an olefin group to form a staple through the olefin group
  VARIANT 4: note = 2-amino-2-(pent-4-en-1-yl)hept-6-enoic acid, useful for stapling/stapled with another amino acid residue comprising an olefin group to form a staple through one of the two olefin groups and/or with another amino acid residue comprising an olefin group to form a staple through the other of the two olefin groups
  SITE 6: note = (S)-3-(2-amino-2-carboxyethyl)benzoic acid
  SITE 7: note = 2-amino-2-methylpropanoic acid
  SITE 10: note = L-lysine, useful for stapling/stapled with another amino acid residue comprising a side chain acid group to form a staple through the 6-amino group
  SITE 11: note (S)-3-amino-1-((pent-4-en-1-yloxy)carbonyl)pyrrolidine-3-ca rboxylic acid, useful for stapling/stapled with another amino acid residue comprising an olefin group to form a staple through the olefin group
  SITE 12: note = (S)-2-amino-3-(thiophen-3-yl)propanoic acid
  SITE 13: note = (S)-2-amino-3-(benzo[b]thiophen-3-yl)propanoic acid
  SITE 14: note = L-glutamic acid, useful for stapling/stapled with another amino acid residue comprising a side chain amino group to form a staple through the 4-carboxyl group
  SITE 15: note = C-term amino
XNIXDXXAFKXXXES

SEQ ID NO: 853 - protein, 14 aa, synthetic construct
  SITE 1: note = N-term Acetic Acid
  SITE 1: note = (R)-2-allylpyrrolidine-2-carboxylic acid, useful for stapling/stapled with another amino acid residue comprising an olefin group to form a staple through the olefin group
  SITE 3: note = (S)-2-amino-4,4-dimethylpentanoic acid
  VARIANT 4: note = 2-amino-2-(pent-4-en-1-yl)hept-6-enoic acid, useful for stapling/stapled with another amino acid residue comprising an olefin group to form a staple through one of the two olefin groups and/or with another amino acid residue comprising an olefin group to form a staple through the other of the two olefin groups
  SITE 6: note = (S)-3-(2-amino-2-carboxyethyl)benzoic acid
  SITE 7: note = 2-amino-2-methylpropanoic acid
  SITE 10: note = L-lysine, useful for stapling/stapled with another amino acid residue comprising a side chain acid group to form a staple through the 6-amino group
  SITE 11: note (S)-3-amino-1-((pent-4-en-1-yloxy)carbonyl)pyrrolidine-3-ca rboxylic acid, useful for stapling/stapled with another amino acid residue comprising an olefin group to form a staple through the olefin group
  SITE 13: note = (S)-2-amino-3-(3,4-dichlorophenyl)propanoic acid
  SITE 14: note = L-glutamic acid, useful for stapling/stapled with another amino acid residue comprising a side chain amino group to form a staple through the 4-carboxyl group
  SITE 14: note = C-term amino
XNXXDXXAFKXFXE

SEQ ID NO: 854 - protein, 15 aa, synthetic construct
  SITE 1: note = N-term Acetic Acid
  SITE 1: note = (R)-2-allylpyrrolidine-2-carboxylic acid, useful for stapling/stapled with another amino acid residue comprising an olefin group to form a staple through the olefin group
  SITE 3: note = (S)-2-amino-4,4-dimethylpentanoic acid
  VARIANT 4: note = 2-amino-2-(pent-4-en-1-yl)hept-6-enoic acid, useful for stapling/stapled with another amino acid residue comprising an olefin group to form a staple through one of the two olefin groups and/or with another amino acid residue comprising an olefin group to form a staple through the other of the two olefin groups
  SITE 6: note = (S)-3-(2-amino-2-carboxyethyl)benzoic acid
  SITE 7: note = 2-amino-2-methylpropanoic acid
  SITE 10: note = L-lysine, useful for stapling/stapled with another amino acid residue comprising a side chain acid group to form a staple through the 6-amino group
  SITE 11: note (S)-3-amino-1-((pent-4-en-1-yloxy)carbonyl)pyrrolidine-3-ca rboxylic acid, useful for stapling/stapled with another amino acid residue comprising an olefin group to form a staple through the olefin group
  SITE 13: note = (S)-2-amino-3-(3,4-dichlorophenyl)propanoic acid
  SITE 14: note = L-glutamic acid, useful for stapling/stapled with another amino acid residue comprising a side chain amino group to form a staple through the 4-carboxyl group
  SITE 15: note = C-term amino
XNXXDXXAFKXFXEA

SEQ ID NO: 855 - protein, 14 aa, synthetic construct
  SITE 1: note = N-term Acetic Acid
  SITE 1: note = (R)-2-allylpyrrolidine-2-carboxylic acid, useful for stapling/stapled with another amino acid residue comprising an olefin group to form a staple through the olefin group
  SITE 3: note = (S)-2-amino-3,3-diphenylpropanoic acid
  VARIANT 4: note = 2-amino-2-(pent-4-en-1-yl)hept-6-enoic acid, useful for stapling/stapled with another amino acid residue comprising an olefin group to form a staple through one of the two olefin groups and/or with another amino acid residue comprising an olefin group to form a staple through the other of the two olefin groups
  SITE 6: note = (S)-3-(2-amino-2-carboxyethyl)benzoic acid
  SITE 7: note = 2-amino-2-methylpropanoic acid
  SITE 10: note = L-lysine, useful for stapling/stapled with another amino acid residue comprising a side chain acid group to form a staple through the 6-amino group
  SITE 11: note (S)-3-amino-1-((pent-4-en-1-yloxy)carbonyl)pyrrolidine-3-ca rboxylic acid, useful for stapling/stapled with another amino acid residue comprising an olefin group to form a staple through the olefin group
  SITE 13: note = (S)-2-amino-3-(3,4-dichlorophenyl)propanoic acid
  SITE 14: note = L-glutamic acid, useful for stapling/stapled with another amino acid residue comprising a side chain amino group to form a staple through the 4-carboxyl group
  SITE 14: note = C-term amino
XNXXDXXAFKXFXE

SEQ ID NO: 856 - protein, 15 aa, synthetic construct
  SITE 1: note = N-term Acetic Acid
  SITE 1: note = (R)-2-allylpyrrolidine-2-carboxylic acid, useful for stapling/stapled with another amino acid residue comprising an olefin group to form a staple through the olefin group
  SITE 3: note = (S)-2-amino-3,3-diphenylpropanoic acid
  VARIANT 4: note = 2-amino-2-(pent-4-en-1-yl)hept-6-enoic acid, useful for stapling/stapled with another amino acid residue comprising an olefin group to form a staple through one of the two olefin groups and/or with another amino acid residue comprising an olefin group to form a staple through the other of the two olefin groups
  SITE 6: note = (S)-3-(2-amino-2-carboxyethyl)benzoic acid
  SITE 7: note = 2-amino-2-methylpropanoic acid
  SITE 10: note = L-lysine, useful for stapling/stapled with another amino acid residue comprising a side chain acid group to form a staple through the 6-amino group
  SITE 11: note (S)-3-amino-1-((pent-4-en-1-yloxy)carbonyl)pyrrolidine-3-ca rboxylic acid, useful for stapling/stapled with another amino acid residue comprising an olefin group to form a staple through the olefin group
  SITE 13: note = (S)-2-amino-3-(3,4-dichlorophenyl)propanoic acid
  SITE 14: note = L-glutamic acid, useful for stapling/stapled with another amino acid residue comprising a side chain amino group to form a staple through the 4-carboxyl group
  SITE 15: note = C-term amino
XNXXDXXAFKXFXEA

SEQ ID NO: 857 - protein, 14 aa, synthetic construct
  SITE 1: note = N-term Acetic Acid
  SITE 1: note = (R)-2-allylpyrrolidine-2-carboxylic acid, useful for stapling/stapled with another amino acid residue comprising an olefin group to form a staple through the olefin group
  VARIANT 4: note = 2-amino-2-(pent-4-en-1-yl)hept-6-enoic acid, useful for stapling/stapled with another amino acid residue comprising an olefin group to form a staple through one of the two olefin groups and/or with another amino acid residue comprising an olefin group to form a staple through the other of the two olefin groups
  SITE 6: note = (S)-3-(2-amino-2-carboxyethyl)benzoic acid
  SITE 7: note = 2-amino-2-methylpropanoic acid
  SITE 10: note = L-lysine, useful for stapling/stapled with another amino acid residue comprising a side chain acid group to form a staple through the 6-amino group
  SITE 11: note (S)-3-amino-1-((pent-4-en-1-yloxy)carbonyl)pyrrolidine-3-ca rboxylic acid, useful for stapling/stapled with another amino acid residue comprising an olefin group to form a staple through the olefin group
  SITE 13: note = (S)-2-amino-3-(3,4-dichlorophenyl)propanoic acid
  SITE 14: note = L-glutamic acid, useful for stapling/stapled with another amino acid residue comprising a side chain amino group to form a staple through the 4-carboxyl group
  SITE 14: note = C-term amino
XNIXDXXAFKXFXE

SEQ ID NO: 858 - protein, 15 aa, synthetic construct
  SITE 1: note = N-term Acetic Acid
  SITE 1: note = (R)-2-allylpyrrolidine-2-carboxylic acid, useful for stapling/stapled with another amino acid residue comprising an olefin group to form a staple through the olefin group
  VARIANT 4: note = 2-amino-2-(pent-4-en-1-yl)hept-6-enoic acid, useful for stapling/stapled with another amino acid residue comprising an olefin group to form a staple through one of the two olefin groups and/or with another amino acid residue comprising an olefin group to form a staple through the other of the two olefin groups
  SITE 6: note = (S)-3-(2-amino-2-carboxyethyl)benzoic acid
  SITE 7: note = 2-amino-2-methylpropanoic acid
  SITE 10: note = L-lysine, useful for stapling/stapled with another amino acid residue comprising a side chain acid group to form a staple through the 6-amino group
  SITE 11: note (S)-3-amino-1-((pent-4-en-1-yloxy)carbonyl)pyrrolidine-3-ca rboxylic acid, useful for stapling/stapled with another amino acid residue comprising an olefin group to form a staple through the olefin group
  SITE 13: note = (S)-2-amino-3-(3,4-dichlorophenyl)propanoic acid
  SITE 14: note = L-glutamic acid, useful for stapling/stapled with another amino acid residue comprising a side chain amino group to form a staple through the 4-carboxyl group
  SITE 15: note = C-term amino
XNIXDXXAFKXFXEA

SEQ ID NO: 859 - protein, 15 aa, synthetic construct
  SITE 1: note = N-term Acetic Acid
  SITE 1: note = (R)-2-allylpyrrolidine-2-carboxylic acid, useful for stapling/stapled with another amino acid residue comprising an olefin group to form a staple through the olefin group
  SITE 3: note = (S)-2-amino-4,4-dimethylpentanoic acid
  VARIANT 4: note = 2-amino-2-(pent-4-en-1-yl)hept-6-enoic acid, useful for stapling/stapled with another amino acid residue comprising an olefin group to form a staple through one of the two olefin groups and/or with another amino acid residue comprising an olefin group to form a staple through the other of the two olefin groups
  SITE 6: note = (S)-3-(2-amino-2-carboxyethyl)benzoic acid
  SITE 7: note = 2-amino-2-methylpropanoic acid
  SITE 10: note = L-lysine, useful for stapling/stapled with another amino acid residue comprising a side chain acid group to form a staple through the 6-amino group
  SITE 11: note (S)-3-amino-1-((pent-4-en-1-yloxy)carbonyl)pyrrolidine-3-ca rboxylic acid, useful for stapling/stapled with another amino acid residue comprising an olefin group to form a staple through the olefin group
  SITE 12: note = (S)-2-amino-3-(thiophen-3-yl)propanoic acid
  SITE 13: note = (S)-2-amino-3-(benzo[b]thiophen-3-yl)propanoic acid
  SITE 14: note = L-glutamic acid, useful for stapling/stapled with another amino acid residue comprising a side chain amino group to form a staple through the 4-carboxyl group
  SITE 15: note (S)-20-amino-14-oxo-2,5,8,11-tetraoxa-15-azahenicosan-21-oi c acid
  SITE 15: note = C-term amino
XDXXDXXAFKXXXEX

SEQ ID NO: 860 - protein, 15 aa, synthetic construct
  SITE 1: note = N-term Acetic Acid
  SITE 1: note = (R)-2-allylpyrrolidine-2-carboxylic acid, useful for stapling/stapled with another amino acid residue comprising an olefin group to form a staple through the olefin group
  SITE 3: note = (S)-2-amino-4,4-dimethylpentanoic acid
  VARIANT 4: note = 2-amino-2-(pent-4-en-1-yl)hept-6-enoic acid, useful for stapling/stapled with another amino acid residue comprising an olefin group to form a staple through one of the two olefin groups and/or with another amino acid residue comprising an olefin group to form a staple through the other of the two olefin groups
  SITE 6: note = (S)-3-(2-amino-2-carboxyethyl)benzoic acid
  SITE 7: note = 2-amino-2-methylpropanoic acid
  SITE 10: note = L-lysine, useful for stapling/stapled with another amino acid residue comprising a side chain acid group to form a staple through the 6-amino group
  SITE 11: note (S)-3-amino-1-((pent-4-en-1-yloxy)carbonyl)pyrrolidine-3-ca rboxylic acid, useful for stapling/stapled with another amino acid residue comprising an olefin group to form a staple through the olefin group
  SITE 12: note = (S)-2-amino-3-(thiophen-3-yl)propanoic acid
  SITE 13: note = (S)-2-amino-3-(benzo[b]thiophen-3-yl)propanoic acid
  SITE 14: note = L-glutamic acid, useful for stapling/stapled with another amino acid residue comprising a side chain amino group to form a staple through the 4-carboxyl group
  SITE 15: note = (S)-32-amino-26-oxo-2,5,8,11,14,17,20,23-octaoxa-27- azatritriacontan-33-oic acid
  SITE 15: note = C-term amino
XDXXDXXAFKXXXEX

SEQ ID NO: 861 - protein, 15 aa, synthetic construct
  SITE 1: note = N-term Acetic Acid
  SITE 1: note = (R)-2-allylpyrrolidine-2-carboxylic acid, useful for stapling/stapled with another amino acid residue comprising an olefin group to form a staple through the olefin group
  SITE 3: note = (S)-2-amino-4,4-dimethylpentanoic acid
  VARIANT 4: note = 2-amino-2-(pent-4-en-1-yl)hept-6-enoic acid, useful for stapling/stapled with another amino acid residue comprising an olefin group to form a staple through one of the two olefin groups and/or with another amino acid residue comprising an olefin group to form a staple through the other of the two olefin groups
  SITE 6: note = (S)-3-(2-amino-2-carboxyethyl)benzoic acid
  SITE 7: note = 2-amino-2-methylpropanoic acid
  SITE 10: note = L-lysine, useful for stapling/stapled with another amino acid residue comprising a side chain acid group to form a staple through the 6-amino group
  SITE 11: note (S)-3-amino-1-((pent-4-en-1-yloxy)carbonyl)pyrrolidine-3-ca rboxylic acid, useful for stapling/stapled with another amino acid residue comprising an olefin group to form a staple through the olefin group
  SITE 12: note = (S)-2-amino-3-(thiophen-3-yl)propanoic acid
  SITE 13: note = (S)-2-amino-3-(benzo[b]thiophen-3-yl)propanoic acid
  SITE 14: note = L-glutamic acid, useful for stapling/stapled with another amino acid residue comprising a side chain amino group to form a staple through the 4-carboxyl group
  SITE 15: note (S)-56-amino-50-oxo-2,5,8,11,14,17,20,23,26,29,32,35,38,41, 44, 47-hexadecaoxa-51-azaheptapentacontan-57-oic acid
  SITE 15: note = C-term amino
XDXXDXXAFKXXXEX

SEQ ID NO: 862 - protein, 15 aa, synthetic construct
  SITE 1: note = N-term 2,5,8,11-tetraoxatetradecan-14-oic acid
  SITE 1: note = (R)-2-allylpyrrolidine-2-carboxylic acid, useful for stapling/stapled with another amino acid residue comprising an olefin group to form a staple through the olefin group
  SITE 3: note = (S)-2-amino-4,4-dimethylpentanoic acid
  VARIANT 4: note = 2-amino-2-(pent-4-en-1-yl)hept-6-enoic acid, useful for stapling/stapled with another amino acid residue comprising an olefin group to form a staple through one of the two olefin groups and/or with another amino acid residue comprising an olefin group to form a staple through the other of the two olefin groups
  SITE 6: note = (S)-3-(2-amino-2-carboxyethyl)benzoic acid
  SITE 7: note = 2-amino-2-methylpropanoic acid
  SITE 10: note = L-lysine, useful for stapling/stapled with another amino acid residue comprising a side chain acid group to form a staple through the 6-amino group
  SITE 11: note (S)-3-amino-1-((pent-4-en-1-yloxy)carbonyl)pyrrolidine-3-ca rboxylic acid, useful for stapling/stapled with another amino acid residue comprising an olefin group to form a staple through the olefin group
  SITE 12: note = (S)-2-amino-3-(thiophen-3-yl)propanoic acid
  SITE 13: note = (S)-2-amino-3-(benzo[b]thiophen-3-yl)propanoic acid
  SITE 14: note = L-glutamic acid, useful for stapling/stapled with another amino acid residue comprising a side chain amino group to form a staple through the 4-carboxyl group
  SITE 15: note = C-term amino
XDXXDXXAFKXXXEA

SEQ ID NO: 863 - protein, 15 aa, synthetic construct
  SITE 1: note = N-term 2,5,8,11,14,17,20,23-octaoxahexacosan-26-oic acid
  SITE 1: note = (R)-2-allylpyrrolidine-2-carboxylic acid, useful for stapling/stapled with another amino acid residue comprising an olefin group to form a staple through the olefin group
  SITE 3: note = (S)-2-amino-4,4-dimethylpentanoic acid
  VARIANT 4: note = 2-amino-2-(pent-4-en-1-yl)hept-6-enoic acid, useful for stapling/stapled with another amino acid residue comprising an olefin group to form a staple through one of the two olefin groups and/or with another amino acid residue comprising an olefin group to form a staple through the other of the two olefin groups
  SITE 6: note = (S)-3-(2-amino-2-carboxyethyl)benzoic acid
  SITE 7: note = 2-amino-2-methylpropanoic acid
  SITE 10: note = L-lysine, useful for stapling/stapled with another amino acid residue comprising a side chain acid group to form a staple through the 6-amino group
  SITE 11: note (S)-3-amino-1-((pent-4-en-1-yloxy)carbonyl)pyrrolidine-3-ca rboxylic acid, useful for stapling/stapled with another amino acid residue comprising an olefin group to form a staple through the olefin group
  SITE 12: note = (S)-2-amino-3-(thiophen-3-yl)propanoic acid
  SITE 13: note = (S)-2-amino-3-(benzo[b]thiophen-3-yl)propanoic acid
  SITE 14: note = L-glutamic acid, useful for stapling/stapled with another amino acid residue comprising a side chain amino group to form a staple through the 4-carboxyl group
  SITE 15: note = C-term amino
XDXXDXXAFKXXXEA

SEQ ID NO: 864 - protein, 15 aa, synthetic construct
  SITE 1: note = N-term 2,5,8,11,14,17,20,23,26,29,32,35,38,41,44,47- hexadecaoxapentacontan-50-oic acid
  SITE 1: note = (R)-2-allylpyrrolidine-2-carboxylic acid, useful for stapling/stapled with another amino acid residue comprising an olefin group to form a staple through the olefin group
  SITE 3: note = (S)-2-amino-4,4-dimethylpentanoic acid
  VARIANT 4: note = 2-amino-2-(pent-4-en-1-yl)hept-6-enoic acid, useful for stapling/stapled with another amino acid residue comprising an olefin group to form a staple through one of the two olefin groups and/or with another amino acid residue comprising an olefin group to form a staple through the other of the two olefin groups
  SITE 6: note = (S)-3-(2-amino-2-carboxyethyl)benzoic acid
  SITE 7: note = 2-amino-2-methylpropanoic acid
  SITE 10: note = L-lysine, useful for stapling/stapled with another amino acid residue comprising a side chain acid group to form a staple through the 6-amino group
  SITE 11: note (S)-3-amino-1-((pent-4-en-1-yloxy)carbonyl)pyrrolidine-3-ca rboxylic acid, useful for stapling/stapled with another amino acid residue comprising an olefin group to form a staple through the olefin group
  SITE 12: note = (S)-2-amino-3-(thiophen-3-yl)propanoic acid
  SITE 13: note = (S)-2-amino-3-(benzo[b]thiophen-3-yl)propanoic acid
  SITE 14: note = L-glutamic acid, useful for stapling/stapled with another amino acid residue comprising a side chain amino group to form a staple through the 4-carboxyl group
  SITE 15: note = C-term amino
XDXXDXXAFKXXXEA

SEQ ID NO: 865 - protein, 15 aa, synthetic construct
  SITE 1: note = N-term 2,5,8,11,14,17,20,23,26,29,32,35,38,41,44,47,50,53,56,59, 62,65,68,71-tetracosaoxatetraheptacontan-74-oic acid
  SITE 1: note = (R)-2-allylpyrrolidine-2-carboxylic acid, useful for stapling/stapled with another amino acid residue comprising an olefin group to form a staple through the olefin group
  SITE 3: note = (S)-2-amino-4,4-dimethylpentanoic acid
  VARIANT 4: note = 2-amino-2-(pent-4-en-1-yl)hept-6-enoic acid, useful for stapling/stapled with another amino acid residue comprising an olefin group to form a staple through one of the two olefin groups and/or with another amino acid residue comprising an olefin group to form a staple through the other of the two olefin groups
  SITE 6: note = (S)-3-(2-amino-2-carboxyethyl)benzoic acid
  SITE 7: note = 2-amino-2-methylpropanoic acid
  SITE 10: note = L-lysine, useful for stapling/stapled with another amino acid residue comprising a side chain acid group to form a staple through the 6-amino group
  SITE 11: note (S)-3-amino-1-((pent-4-en-1-yloxy)carbonyl)pyrrolidine-3-ca rboxylic acid, useful for stapling/stapled with another amino acid residue comprising an olefin group to form a staple through the olefin group
  SITE 12: note = (S)-2-amino-3-(thiophen-3-yl)propanoic acid
  SITE 13: note = (S)-2-amino-3-(benzo[b]thiophen-3-yl)propanoic acid
  SITE 14: note = L-glutamic acid, useful for stapling/stapled with another amino acid residue comprising a side chain amino group to form a staple through the 4-carboxyl group
  SITE 15: note = C-term amino
XDXXDXXAFKXXXEA

SEQ ID NO: 866 - protein, 15 aa, synthetic construct
  SITE 1: note = N-term Acetic Acid
  SITE 1: note = (R)-2-allylpyrrolidine-2-carboxylic acid, useful for stapling/stapled with another amino acid residue comprising an olefin group to form a staple through the olefin group
  SITE 3: note = (S)-2-amino-4,4-dimethylpentanoic acid
  VARIANT 4: note = 2-amino-2-(pent-4-en-1-yl)hept-6-enoic acid, useful for stapling/stapled with another amino acid residue comprising an olefin group to form a staple through one of the two olefin groups and/or with another amino acid residue comprising an olefin group to form a staple through the other of the two olefin groups
  SITE 6: note = (S)-2-amino-3-(3-boronophenyl)propanoic acid
  SITE 7: note = 2-amino-2-methylpropanoic acid
  SITE 10: note = L-lysine, useful for stapling/stapled with another amino acid residue comprising a side chain acid group to form a staple through the 6-amino group
  SITE 11: note (S)-3-amino-1-((pent-4-en-1-yloxy)carbonyl)pyrrolidine-3-ca rboxylic acid, useful for stapling/stapled with another amino acid residue comprising an olefin group to form a staple through the olefin group
  SITE 12: note = (S)-2-amino-3-(thiophen-3-yl)propanoic acid
  SITE 13: note = (S)-2-amino-3-(benzo[b]thiophen-3-yl)propanoic acid
  SITE 14: note = L-glutamic acid, useful for stapling/stapled with another amino acid residue comprising a side chain amino group to form a staple through the 4-carboxyl group
  SITE 15: note = C-term amino
XDXXDXXAFKXXXEA

SEQ ID NO: 867 - protein, 15 aa, synthetic construct
  SITE 1: note = N-term Acetic Acid
  SITE 1: note = (R)-2-allylpyrrolidine-2-carboxylic acid, useful for stapling/stapled with another amino acid residue comprising an olefin group to form a staple through the olefin group
  SITE 3: note = (S)-2-amino-4,4-dimethylpentanoic acid
  VARIANT 4: note = 2-amino-2-(pent-4-en-1-yl)hept-6-enoic acid, useful for stapling/stapled with another amino acid residue comprising an olefin group to form a staple through one of the two olefin groups and/or with another amino acid residue comprising an olefin group to form a staple through the other of the two olefin groups
  SITE 6: note = (S)-2-amino-3-(4-boronophenyl)propanoic acid
  SITE 7: note = 2-amino-2-methylpropanoic acid
  SITE 10: note = L-lysine, useful for stapling/stapled with another amino acid residue comprising a side chain acid group to form a staple through the 6-amino group
  SITE 11: note (S)-3-amino-1-((pent-4-en-1-yloxy)carbonyl)pyrrolidine-3-ca rboxylic acid, useful for stapling/stapled with another amino acid residue comprising an olefin group to form a staple through the olefin group
  SITE 12: note = (S)-2-amino-3-(thiophen-3-yl)propanoic acid
  SITE 13: note = (S)-2-amino-3-(benzo[b]thiophen-3-yl)propanoic acid
  SITE 14: note = L-glutamic acid, useful for stapling/stapled with another amino acid residue comprising a side chain amino group to form a staple through the 4-carboxyl group
  SITE 15: note = C-term amino
XDXXDXXAFKXXXEA

SEQ ID NO: 868 - protein, 16 aa, synthetic construct
  SITE 1: note = N-term Acetic Acid
  SITE 1: note = (S)-2-amino-2-methylhept-6-enoic acid, useful for stapling/stapled with another amino acid residue comprising an olefin group to form a staple through the olefin group
  SITE 4: note = (S)-2-amino-4,4-dimethylpentanoic acid
  VARIANT 5: note = 2-amino-2-(pent-4-en-1-yl)hept-6-enoic acid, useful for stapling/stapled with another amino acid residue comprising an olefin group to form a staple through one of the two olefin groups and/or with another amino acid residue comprising an olefin group to form a staple through the other of the two olefin groups
  SITE 7: note = (S)-3-(2-amino-2-carboxyethyl)benzoic acid
  SITE 8: note = 2-amino-2-methylpropanoic acid
  SITE 11: note = L-lysine, useful for stapling/stapled with another amino acid residue comprising a side chain acid group to form a staple through the 6-amino group
  SITE 12: note (S)-3-amino-1-((pent-4-en-1-yloxy)carbonyl)pyrrolidine-3-ca rboxylic acid, useful for stapling/stapled with another amino acid residue comprising an olefin group to form a staple through the olefin group
  SITE 13: note = (S)-2-amino-3-(thiophen-3-yl)propanoic acid
  SITE 14: note = (S)-2-amino-3-(benzo[b]thiophen-3-yl)propanoic acid
  SITE 15: note = L-glutamic acid, useful for stapling/stapled with another amino acid residue comprising a side chain amino group to form a staple through the 4-carboxyl group
  SITE 16: note = C-term amino
XAEXXDXXAFKXXXEA

SEQ ID NO: 869 - protein, 16 aa, synthetic construct
  SITE 1: note = N-term Acetic Acid
  SITE 1: note = (S)-2-amino-2-methylhept-6-enoic acid, useful for stapling/stapled with another amino acid residue comprising an olefin group to form a staple through the olefin group
  SITE 4: note = (S)-2-amino-4,4-dimethylpentanoic acid
  VARIANT 5: note = 2-amino-2-(pent-4-en-1-yl)hept-6-enoic acid, useful for stapling/stapled with another amino acid residue comprising an olefin group to form a staple through one of the two olefin groups and/or with another amino acid residue comprising an olefin group to form a staple through the other of the two olefin groups
  SITE 7: note = (S)-3-(2-amino-2-carboxyethyl)benzoic acid
  SITE 8: note = 2-amino-2-methylpropanoic acid
  SITE 11: note = L-lysine, useful for stapling/stapled with another amino acid residue comprising a side chain acid group to form a staple through the 6-amino group
  SITE 12: note (S)-3-amino-1-((pent-4-en-1-yloxy)carbonyl)pyrrolidine-3-ca rboxylic acid, useful for stapling/stapled with another amino acid residue comprising an olefin group to form a staple through the olefin group
  SITE 13: note = (S)-2-amino-3-(thiophen-3-yl)propanoic acid
  SITE 14: note = (S)-2-amino-3-(benzo[b]thiophen-3-yl)propanoic acid
  SITE 15: note = L-glutamic acid, useful for stapling/stapled with another amino acid residue comprising a side chain amino group to form a staple through the 4-carboxyl group
  SITE 16: note = C-term amino
XANXXDXXAFKXXXEA

SEQ ID NO: 870 - protein, 16 aa, synthetic construct
  SITE 1: note = N-term Acetic Acid
  SITE 1: note = (S)-2-amino-2-methylhept-6-enoic acid, useful for stapling/stapled with another amino acid residue comprising an olefin group to form a staple through the olefin group
  SITE 4: note = (S)-2-amino-4,4-dimethylpentanoic acid
  VARIANT 5: note = 2-amino-2-(pent-4-en-1-yl)hept-6-enoic acid, useful for stapling/stapled with another amino acid residue comprising an olefin group to form a staple through one of the two olefin groups and/or with another amino acid residue comprising an olefin group to form a staple through the other of the two olefin groups
  SITE 7: note = (S)-3-(2-amino-2-carboxyethyl)benzoic acid
  SITE 8: note = 2-amino-2-methylpropanoic acid
  SITE 11: note = L-lysine, useful for stapling/stapled with another amino acid residue comprising a side chain acid group to form a staple through the 6-amino group
  SITE 12: note (S)-3-amino-1-((pent-4-en-1-yloxy)carbonyl)pyrrolidine-3-ca rboxylic acid, useful for stapling/stapled with another amino acid residue comprising an olefin group to form a staple through the olefin group
  SITE 13: note = (S)-2-amino-3-(thiophen-3-yl)propanoic acid
  SITE 14: note = (S)-2-amino-3-(benzo[b]thiophen-3-yl)propanoic acid
  SITE 15: note = L-glutamic acid, useful for stapling/stapled with another amino acid residue comprising a side chain amino group to form a staple through the 4-carboxyl group
  SITE 16: note = C-term amino
XASXXDXXAFKXXXEA

SEQ ID NO: 871 - protein, 16 aa, synthetic construct
  SITE 1: note = N-term Acetic Acid
  SITE 1: note = (S)-2-amino-2-methylhept-6-enoic acid, useful for stapling/stapled with another amino acid residue comprising an olefin group to form a staple through the olefin group
  SITE 3: note = L-homoserine
  SITE 4: note = (S)-2-amino-4,4-dimethylpentanoic acid
  VARIANT 5: note = 2-amino-2-(pent-4-en-1-yl)hept-6-enoic acid, useful for stapling/stapled with another amino acid residue comprising an olefin group to form a staple through one of the two olefin groups and/or with another amino acid residue comprising an olefin group to form a staple through the other of the two olefin groups
  SITE 7: note = (S)-3-(2-amino-2-carboxyethyl)benzoic acid
  SITE 8: note = 2-amino-2-methylpropanoic acid
  SITE 11: note = L-lysine, useful for stapling/stapled with another amino acid residue comprising a side chain acid group to form a staple through the 6-amino group
  SITE 12: note (S)-3-amino-1-((pent-4-en-1-yloxy)carbonyl)pyrrolidine-3-ca rboxylic acid, useful for stapling/stapled with another amino acid residue comprising an olefin group to form a staple through the olefin group
  SITE 13: note = (S)-2-amino-3-(thiophen-3-yl)propanoic acid
  SITE 14: note = (S)-2-amino-3-(benzo[b]thiophen-3-yl)propanoic acid
  SITE 15: note = L-glutamic acid, useful for stapling/stapled with another amino acid residue comprising a side chain amino group to form a staple through the 4-carboxyl group
  SITE 16: note = C-term amino
XASXXDXXAFKXXXEA

SEQ ID NO: 872 - protein, 16 aa, synthetic construct
  SITE 1: note = N-term Acetic Acid
  SITE 1: note = (S)-2-amino-2-methylhept-6-enoic acid, useful for stapling/stapled with another amino acid residue comprising an olefin group to form a staple through the olefin group
  SITE 4: note = (S)-2-amino-4,4-dimethylpentanoic acid
  VARIANT 5: note = 2-amino-2-(pent-4-en-1-yl)hept-6-enoic acid, useful for stapling/stapled with another amino acid residue comprising an olefin group to form a staple through one of the two olefin groups and/or with another amino acid residue comprising an olefin group to form a staple through the other of the two olefin groups
  SITE 7: note = (S)-3-(2-amino-2-carboxyethyl)benzoic acid
  SITE 8: note = 2-amino-2-methylpropanoic acid
  SITE 11: note = L-lysine, useful for stapling/stapled with another amino acid residue comprising a side chain acid group to form a staple through the 6-amino group
  SITE 12: note (S)-3-amino-1-((pent-4-en-1-yloxy)carbonyl)pyrrolidine-3-ca rboxylic acid, useful for stapling/stapled with another amino acid residue comprising an olefin group to form a staple through the olefin group
  SITE 13: note = (S)-2-amino-3-(thiophen-3-yl)propanoic acid
  SITE 14: note = (S)-2-amino-3-(benzo[b]thiophen-3-yl)propanoic acid
  SITE 15: note = L-glutamic acid, useful for stapling/stapled with another amino acid residue comprising a side chain amino group to form a staple through the 4-carboxyl group
  SITE 16: note = C-term amino
XADXXEXXAFKXXXEA

SEQ ID NO: 873 - protein, 16 aa, synthetic construct
  SITE 1: note = N-term Acetic Acid
  SITE 1: note = (S)-2-amino-2-methylhept-6-enoic acid, useful for stapling/stapled with another amino acid residue comprising an olefin group to form a staple through the olefin group
  SITE 4: note = (S)-2-amino-4,4-dimethylpentanoic acid
  VARIANT 5: note = 2-amino-2-(pent-4-en-1-yl)hept-6-enoic acid, useful for stapling/stapled with another amino acid residue comprising an olefin group to form a staple through one of the two olefin groups and/or with another amino acid residue comprising an olefin group to form a staple through the other of the two olefin groups
  SITE 7: note = (S)-3-(2-amino-2-carboxyethyl)benzoic acid
  SITE 8: note = 2-amino-2-methylpropanoic acid
  SITE 11: note = L-lysine, useful for stapling/stapled with another amino acid residue comprising a side chain acid group to form a staple through the 6-amino group
  SITE 12: note (S)-3-amino-1-((pent-4-en-1-yloxy)carbonyl)pyrrolidine-3-ca rboxylic acid, useful for stapling/stapled with another amino acid residue comprising an olefin group to form a staple through the olefin group
  SITE 13: note = (S)-2-amino-3-(thiophen-3-yl)propanoic acid
  SITE 14: note = (S)-2-amino-3-(benzo[b]thiophen-3-yl)propanoic acid
  SITE 15: note = L-glutamic acid, useful for stapling/stapled with another amino acid residue comprising a side chain amino group to form a staple through the 4-carboxyl group
  SITE 16: note = C-term amino
XADXXNXXAFKXXXEA

SEQ ID NO: 874 - protein, 16 aa, synthetic construct
  SITE 1: note = N-term Acetic Acid
  SITE 1: note = (S)-2-amino-2-methylhept-6-enoic acid, useful for stapling/stapled with another amino acid residue comprising an olefin group to form a staple through the olefin group
  SITE 4: note = (S)-2-amino-4,4-dimethylpentanoic acid
  VARIANT 5: note = 2-amino-2-(pent-4-en-1-yl)hept-6-enoic acid, useful for stapling/stapled with another amino acid residue comprising an olefin group to form a staple through one of the two olefin groups and/or with another amino acid residue comprising an olefin group to form a staple through the other of the two olefin groups
  SITE 7: note = (S)-3-(2-amino-2-carboxyethyl)benzoic acid
  SITE 8: note = 2-amino-2-methylpropanoic acid
  SITE 11: note = L-lysine, useful for stapling/stapled with another amino acid residue comprising a side chain acid group to form a staple through the 6-amino group
  SITE 12: note (S)-3-amino-1-((pent-4-en-1-yloxy)carbonyl)pyrrolidine-3-ca rboxylic acid, useful for stapling/stapled with another amino acid residue comprising an olefin group to form a staple through the olefin group
  SITE 13: note = (S)-2-amino-3-(thiophen-3-yl)propanoic acid
  SITE 14: note = (S)-2-amino-3-(benzo[b]thiophen-3-yl)propanoic acid
  SITE 15: note = L-glutamic acid, useful for stapling/stapled with another amino acid residue comprising a side chain amino group to form a staple through the 4-carboxyl group
  SITE 16: note = C-term amino
XADXXSXXAFKXXXEA

SEQ ID NO: 875 - protein, 16 aa, synthetic construct
  SITE 1: note = N-term Acetic Acid
  SITE 1: note = (S)-2-amino-2-methylhept-6-enoic acid, useful for stapling/stapled with another amino acid residue comprising an olefin group to form a staple through the olefin group
  SITE 4: note = (S)-2-amino-4,4-dimethylpentanoic acid
  VARIANT 5: note = 2-amino-2-(pent-4-en-1-yl)hept-6-enoic acid, useful for stapling/stapled with another amino acid residue comprising an olefin group to form a staple through one of the two olefin groups and/or with another amino acid residue comprising an olefin group to form a staple through the other of the two olefin groups
  SITE 6: note = L-homoserine
  SITE 7: note = (S)-3-(2-amino-2-carboxyethyl)benzoic acid
  SITE 8: note = 2-amino-2-methylpropanoic acid
  SITE 11: note = L-lysine, useful for stapling/stapled with another amino acid residue comprising a side chain acid group to form a staple through the 6-amino group
  SITE 12: note (S)-3-amino-1-((pent-4-en-1-yloxy)carbonyl)pyrrolidine-3-ca rboxylic acid, useful for stapling/stapled with another amino acid residue comprising an olefin group to form a staple through the olefin group
  SITE 13: note = (S)-2-amino-3-(thiophen-3-yl)propanoic acid
  SITE 14: note = (S)-2-amino-3-(benzo[b]thiophen-3-yl)propanoic acid
  SITE 15: note = L-glutamic acid, useful for stapling/stapled with another amino acid residue comprising a side chain amino group to form a staple through the 4-carboxyl group
  SITE 16: note = C-term amino
XADXXSXXAFKXXXEA

SEQ ID NO: 876 - protein, 16 aa, synthetic construct
  SITE 1: note = N-term Acetic Acid
  SITE 1: note = (S)-2-amino-2-methylhept-6-enoic acid, useful for stapling/stapled with another amino acid residue comprising an olefin group to form a staple through the olefin group
  SITE 4: note = (S)-2-amino-4,4-dimethylpentanoic acid
  VARIANT 5: note = 2-amino-2-(pent-4-en-1-yl)hept-6-enoic acid, useful for stapling/stapled with another amino acid residue comprising an olefin group to form a staple through one of the two olefin groups and/or with another amino acid residue comprising an olefin group to form a staple through the other of the two olefin groups
  SITE 7: note = (S)-3-(2-amino-2-carboxyethyl)benzoic acid
  SITE 8: note = 2-amino-2-methylpropanoic acid
  SITE 11: note = L-lysine, useful for stapling/stapled with another amino acid residue comprising a side chain acid group to form a staple through the 6-amino group
  SITE 12: note (S)-3-amino-1-((pent-4-en-1-yloxy)carbonyl)pyrrolidine-3-ca rboxylic acid, useful for stapling/stapled with another amino acid residue comprising an olefin group to form a staple through the olefin group
  SITE 13: note = (S)-2-amino-3-(thiophen-3-yl)propanoic acid
  SITE 14: note = (S)-2-amino-3-(benzo[b]thiophen-3-yl)propanoic acid
  SITE 15: note = L-glutamic acid, useful for stapling/stapled with another amino acid residue comprising a side chain amino group to form a staple through the 4-carboxyl group
  SITE 16: note = C-term amino
XAEXXEXXAFKXXXEA

SEQ ID NO: 877 - protein, 16 aa, synthetic construct
  SITE 1: note = N-term Acetic Acid
  SITE 1: note = (S)-2-amino-2-methylhept-6-enoic acid, useful for stapling/stapled with another amino acid residue comprising an olefin group to form a staple through the olefin group
  SITE 4: note = (S)-2-amino-4,4-dimethylpentanoic acid
  VARIANT 5: note = 2-amino-2-(pent-4-en-1-yl)hept-6-enoic acid, useful for stapling/stapled with another amino acid residue comprising an olefin group to form a staple through one of the two olefin groups and/or with another amino acid residue comprising an olefin group to form a staple through the other of the two olefin groups
  SITE 7: note = (S)-3-(2-amino-2-carboxyethyl)benzoic acid
  SITE 8: note = 2-amino-2-methylpropanoic acid
  SITE 11: note = L-lysine, useful for stapling/stapled with another amino acid residue comprising a side chain acid group to form a staple through the 6-amino group
  SITE 12: note (S)-3-amino-1-((pent-4-en-1-yloxy)carbonyl)pyrrolidine-3-ca rboxylic acid, useful for stapling/stapled with another amino acid residue comprising an olefin group to form a staple through the olefin group
  SITE 13: note = (S)-2-amino-3-(thiophen-3-yl)propanoic acid
  SITE 14: note = (S)-2-amino-3-(benzo[b]thiophen-3-yl)propanoic acid
  SITE 15: note = L-glutamic acid, useful for stapling/stapled with another amino acid residue comprising a side chain amino group to form a staple through the 4-carboxyl group
  SITE 16: note = C-term amino
XEEXXDXXAFKXXXEA

SEQ ID NO: 878 - protein, 16 aa, synthetic construct
  SITE 1: note = N-term Acetic Acid
  SITE 1: note = (S)-2-amino-2-methylhept-6-enoic acid, useful for stapling/stapled with another amino acid residue comprising an olefin group to form a staple through the olefin group
  SITE 4: note = (S)-2-amino-4,4-dimethylpentanoic acid
  VARIANT 5: note = 2-amino-2-(pent-4-en-1-yl)hept-6-enoic acid, useful for stapling/stapled with another amino acid residue comprising an olefin group to form a staple through one of the two olefin groups and/or with another amino acid residue comprising an olefin group to form a staple through the other of the two olefin groups
  SITE 7: note = (S)-3-(2-amino-2-carboxyethyl)benzoic acid
  SITE 8: note = 2-amino-2-methylpropanoic acid
  SITE 11: note = L-lysine, useful for stapling/stapled with another amino acid residue comprising a side chain acid group to form a staple through the 6-amino group
  SITE 12: note (S)-3-amino-1-((pent-4-en-1-yloxy)carbonyl)pyrrolidine-3-ca rboxylic acid, useful for stapling/stapled with another amino acid residue comprising an olefin group to form a staple through the olefin group
  SITE 13: note = (S)-2-amino-3-(thiophen-3-yl)propanoic acid
  SITE 14: note = (S)-2-amino-3-(benzo[b]thiophen-3-yl)propanoic acid
  SITE 15: note = L-glutamic acid, useful for stapling/stapled with another amino acid residue comprising a side chain amino group to form a staple through the 4-carboxyl group
  SITE 16: note = C-term amino
XEDXXEXXAFKXXXEA

SEQ ID NO: 879 - protein, 15 aa, synthetic construct
  SITE 1: note = N-term Acetic Acid
  SITE 1: note = (R)-2-allylpyrrolidine-2-carboxylic acid, useful for stapling/stapled with another amino acid residue comprising an olefin group to form a staple through the olefin group
  SITE 3: note = (S)-2-amino-4,4-dimethylpentanoic acid
  VARIANT 4: note = 2-amino-2-(pent-4-en-1-yl)hept-6-enoic acid, useful for stapling/stapled with another amino acid residue comprising an olefin group to form a staple through one of the two olefin groups and/or with another amino acid residue comprising an olefin group to form a staple through the other of the two olefin groups
  SITE 6: note = (S)-3-(2-amino-2-carboxyethyl)benzoic acid
  SITE 11: note (S)-2-amino-3-(2-amino-N-(hept-6-en-1-yl)acetamido)propanoi c acid, useful for stapling/stapled with another amino acid residue comprising an olefin group to form a staple through the olefin group and useful for stapling/stapled with another amino acid residue comprising a side chain acid group to form a staple through the amino group in the side chain
  SITE 12: note = (S)-2-amino-3-(thiophen-3-yl)propanoic acid
  SITE 13: note = (S)-2-amino-3-(benzo[b]thiophen-3-yl)propanoic acid
  SITE 15: note = L-glutamic acid, useful for stapling/stapled with another amino acid residue comprising a side chain amino group to form a staple through the acid group in the side chain
  SITE 15: note = C-term amino
XDXXDXAAFLXXXAE

SEQ ID NO: 880 - protein, 15 aa, synthetic construct
  SITE 1: note = N-term Acetic Acid
  SITE 1: note = (R)-2-allylpyrrolidine-2-carboxylic acid, useful for stapling/stapled with another amino acid residue comprising an olefin group to form a staple through the olefin group
  SITE 3: note = (S)-2-amino-4,4-dimethylpentanoic acid
  VARIANT 4: note = 2-amino-2-(pent-4-en-1-yl)hept-6-enoic acid, useful for stapling/stapled with another amino acid residue comprising an olefin group to form a staple through one of the two olefin groups and/or with another amino acid residue comprising an olefin group to form a staple through the other of the two olefin groups
  SITE 6: note = (S)-3-(2-amino-2-carboxyethyl)benzoic acid
  SITE 11: note (S)-2-amino-3-(5-amino-N-(hept-6-en-1-yl)pentanamido)propan oic acid, useful for stapling/stapled with another amino acid residue comprising an olefin group to form a staple through the olefin group and useful for stapling/stapled with another amino acid residue comprising a side chain acid group to form a staple through the amino group in the side chain
  SITE 12: note = (S)-2-amino-3-(thiophen-3-yl)propanoic acid
  SITE 13: note = (S)-2-amino-3-(benzo[b]thiophen-3-yl)propanoic acid
  SITE 15: note = L-glutamic acid, useful for stapling/stapled with another amino acid residue comprising a side chain amino group to form a staple through the acid group in the side chain
  SITE 15: note = C-term amino
XDXXDXAAFLXXXAE

SEQ ID NO: 881 - protein, 15 aa, synthetic construct
  SITE 1: note = N-term Acetic Acid
  SITE 1: note = (R)-2-allylpyrrolidine-2-carboxylic acid, useful for stapling/stapled with another amino acid residue comprising an olefin group to form a staple through the olefin group
  SITE 3: note = (S)-2-amino-4,4-dimethylpentanoic acid
  VARIANT 4: note = 2-amino-2-(pent-4-en-1-yl)hept-6-enoic acid, useful for stapling/stapled with another amino acid residue comprising an olefin group to form a staple through one of the two olefin groups and/or with another amino acid residue comprising an olefin group to form a staple through the other of the two olefin groups
  SITE 6: note = (S)-3-(2-amino-2-carboxyethyl)benzoic acid
  SITE 11: note (S)-2-amino-3-(N-(2-aminoethyl)hept-6-enamido)propanoic acid, useful for stapling/stapled with another amino acid residue comprising an olefin group to form a staple through the olefin group and useful for stapling/stapled with another amino acid residue comprising a side chain acid group to form a staple through the amino group in the side chain
  SITE 12: note = (S)-2-amino-3-(thiophen-3-yl)propanoic acid
  SITE 13: note = (S)-2-amino-3-(benzo[b]thiophen-3-yl)propanoic acid
  SITE 15: note = L-glutamic acid, useful for stapling/stapled with another amino acid residue comprising a side chain amino group to form a staple through the acid group in the side chain
  SITE 15: note = C-term amino
XDXXDXAAFLXXXAE

SEQ ID NO: 882 - protein, 15 aa, synthetic construct
  SITE 1: note = N-term Acetic Acid
  SITE 1: note = (R)-2-allylpyrrolidine-2-carboxylic acid, useful for stapling/stapled with another amino acid residue comprising an olefin group to form a staple through the olefin group
  SITE 3: note = (S)-2-amino-4,4-dimethylpentanoic acid
  VARIANT 4: note = 2-amino-2-(pent-4-en-1-yl)hept-6-enoic acid, useful for stapling/stapled with another amino acid residue comprising an olefin group to form a staple through one of the two olefin groups and/or with another amino acid residue comprising an olefin group to form a staple through the other of the two olefin groups
  SITE 6: note = (S)-3-(2-amino-2-carboxyethyl)benzoic acid
  SITE 11: note (S)-2-amino-3-(N-(3-aminopropyl)hept-6-enamido)propanoic acid, useful for stapling/stapled with another amino acid residue comprising an olefin group to form a staple through the olefin group and useful for stapling/stapled with another amino acid residue comprising a side chain acid group to form a staple through the amino group in the side chain
  SITE 12: note = (S)-2-amino-3-(thiophen-3-yl)propanoic acid
  SITE 13: note = (S)-2-amino-3-(benzo[b]thiophen-3-yl)propanoic acid
  SITE 15: note = L-glutamic acid, useful for stapling/stapled with another amino acid residue comprising a side chain amino group to form a staple through the acid group in the side chain
  SITE 15: note = C-term amino
XDXXDXAAFLXXXAE

SEQ ID NO: 883 - protein, 16 aa, synthetic construct
  SITE 1: note = N-term Acetic Acid
  SITE 1: note = (S)-2-amino-2-methylhept-6-enoic acid, useful for stapling/stapled with another amino acid residue comprising an olefin group to form a staple through the olefin group
  SITE 4: note = (S)-2-amino-4,4-dimethylpentanoic acid
  VARIANT 5: note = 2-amino-2-(pent-4-en-1-yl)hept-6-enoic acid, useful for stapling/stapled with another amino acid residue comprising an olefin group to form a staple through one of the two olefin groups and/or with another amino acid residue comprising an olefin group to form a staple through the other of the two olefin groups
  SITE 7: note = (S)-3-(2-amino-2-carboxyethyl)benzoic acid
  SITE 8: note = 2-amino-2-methylpropanoic acid
  SITE 11: note = L-lysine, useful for stapling/stapled with another amino acid residue comprising a side chain acid group to form a staple through the 6-amino group
  SITE 12: note (S)-3-amino-1-((pent-4-en-1-yloxy)carbonyl)pyrrolidine-3-ca rboxylic acid, useful for stapling/stapled with another amino acid residue comprising an olefin group to form a staple through the olefin group
  SITE 13: note = (S)-2-amino-3-(thiophen-3-yl)propanoic acid
  SITE 14: note = (S)-2-amino-3-(benzo[b]thiophen-3-yl)propanoic acid
  SITE 15: note = L-glutamic acid, useful for stapling/stapled with another amino acid residue comprising a side chain amino group to form a staple through the 4-carboxyl group
  SITE 16: note = C-term amino
XEEXXEXXAFKXXXEA

SEQ ID NO: 884 - protein, 16 aa, synthetic construct
  SITE 1: note = N-term Acetic Acid
  SITE 1: note = (S)-2-amino-2-methylhept-6-enoic acid, useful for stapling/stapled with another amino acid residue comprising an olefin group to form a staple through the olefin group
  SITE 4: note = (S)-2-amino-4,4-dimethylpentanoic acid
  VARIANT 5: note = 2-amino-2-(pent-4-en-1-yl)hept-6-enoic acid, useful for stapling/stapled with another amino acid residue comprising an olefin group to form a staple through one of the two olefin groups and/or with another amino acid residue comprising an olefin group to form a staple through the other of the two olefin groups
  SITE 7: note = (S)-3-(2-amino-2-carboxyethyl)benzoic acid
  SITE 8: note = 2-amino-2-methylpropanoic acid
  SITE 11: note = L-lysine, useful for stapling/stapled with another amino acid residue comprising a side chain acid group to form a staple through the 6-amino group
  SITE 12: note (S)-3-amino-1-((pent-4-en-1-yloxy)carbonyl)pyrrolidine-3-ca rboxylic acid, useful for stapling/stapled with another amino acid residue comprising an olefin group to form a staple through the olefin group
  SITE 14: note = (S)-2-amino-3-(3,4-dichlorophenyl)propanoic acid
  SITE 15: note = L-glutamic acid, useful for stapling/stapled with another amino acid residue comprising a side chain amino group to form a staple through the 4-carboxyl group
  SITE 16: note = C-term amino
XADXXDXXAFKXFXEA

SEQ ID NO: 885 - protein, 15 aa, synthetic construct
  SITE 1: note = N-term Acetic Acid
  SITE 1: note = (S)-2-amino-2-methylhept-6-enoic acid, useful for stapling/stapled with another amino acid residue comprising an olefin group to form a staple through the olefin group
  SITE 4: note = (S)-2-amino-4,4-dimethylpentanoic acid
  VARIANT 5: note = 2-amino-2-(pent-4-en-1-yl)hept-6-enoic acid, useful for stapling/stapled with another amino acid residue comprising an olefin group to form a staple through one of the two olefin groups and/or with another amino acid residue comprising an olefin group to form a staple through the other of the two olefin groups
  SITE 7: note = (S)-3-(2-amino-2-carboxyethyl)benzoic acid
  SITE 8: note = 2-amino-2-methylpropanoic acid
  SITE 11: note = L-lysine, useful for stapling/stapled with another amino acid residue comprising a side chain acid group to form a staple through the 6-amino group
  SITE 12: note (S)-3-amino-1-((pent-4-en-1-yloxy)carbonyl)pyrrolidine-3-ca rboxylic acid, useful for stapling/stapled with another amino acid residue comprising an olefin group to form a staple through the olefin group
  SITE 14: note = (S)-2-amino-3-(3,4-dichlorophenyl)propanoic acid
  SITE 15: note = L-glutamic acid, useful for stapling/stapled with another amino acid residue comprising a side chain amino group to form a staple through the 4-carboxyl group
  SITE 15: note = C-term amino
XADXXDXXAFKXFXE

SEQ ID NO: 886 - protein, 16 aa, synthetic construct
  SITE 1: note = N-term Acetic Acid
  SITE 1: note = (S)-2-amino-2-methylhept-6-enoic acid, useful for stapling/stapled with another amino acid residue comprising an olefin group to form a staple through the olefin group
  SITE 4: note = (S)-2-amino-4,4-dimethylpentanoic acid
  VARIANT 5: note = 2-amino-2-(pent-4-en-1-yl)hept-6-enoic acid, useful for stapling/stapled with another amino acid residue comprising an olefin group to form a staple through one of the two olefin groups and/or with another amino acid residue comprising an olefin group to form a staple through the other of the two olefin groups
  SITE 7: note = (S)-3-(2-amino-2-carboxyethyl)benzoic acid
  SITE 8: note = 2-amino-2-methylpropanoic acid
  SITE 11: note = L-lysine, useful for stapling/stapled with another amino acid residue comprising a side chain acid group to form a staple through the 6-amino group
  SITE 12: note (S)-3-amino-1-((pent-4-en-1-yloxy)carbonyl)pyrrolidine-3-ca rboxylic acid, useful for stapling/stapled with another amino acid residue comprising an olefin group to form a staple through the olefin group
  SITE 13: note = (S)-2-amino-3-(thiophen-3-yl)propanoic acid
  SITE 14: note = (S)-2-amino-3-(3,4-dichlorophenyl)propanoic acid
  SITE 15: note = L-glutamic acid, useful for stapling/stapled with another amino acid residue comprising a side chain amino group to form a staple through the 4-carboxyl group
  SITE 16: note = C-term amino
XADXXDXXAFKXXXEA

SEQ ID NO: 887 - protein, 15 aa, synthetic construct
  SITE 1: note = N-term Acetic Acid
  SITE 1: note = (S)-2-amino-2-methylhept-6-enoic acid, useful for stapling/stapled with another amino acid residue comprising an olefin group to form a staple through the olefin group
  SITE 4: note = (S)-2-amino-4,4-dimethylpentanoic acid
  VARIANT 5: note = 2-amino-2-(pent-4-en-1-yl)hept-6-enoic acid, useful for stapling/stapled with another amino acid residue comprising an olefin group to form a staple through one of the two olefin groups and/or with another amino acid residue comprising an olefin group to form a staple through the other of the two olefin groups
  SITE 7: note = (S)-3-(2-amino-2-carboxyethyl)benzoic acid
  SITE 8: note = 2-amino-2-methylpropanoic acid
  SITE 11: note = L-lysine, useful for stapling/stapled with another amino acid residue comprising a side chain acid group to form a staple through the 6-amino group
  SITE 12: note (S)-3-amino-1-((pent-4-en-1-yloxy)carbonyl)pyrrolidine-3-ca rboxylic acid, useful for stapling/stapled with another amino acid residue comprising an olefin group to form a staple through the olefin group
  SITE 13: note = (S)-2-amino-3-(thiophen-3-yl)propanoic acid
  SITE 14: note = (S)-2-amino-3-(3,4-dichlorophenyl)propanoic acid
  SITE 15: note = L-glutamic acid, useful for stapling/stapled with another amino acid residue comprising a side chain amino group to form a staple through the 4-carboxyl group
  SITE 15: note = C-term amino
XADXXDXXAFKXXXE

SEQ ID NO: 888 - protein, 16 aa, synthetic construct
  SITE 1: note = N-term Acetic Acid
  SITE 1: note = (S)-2-amino-2-methylhept-6-enoic acid, useful for stapling/stapled with another amino acid residue comprising an olefin group to form a staple through the olefin group
  VARIANT 5: note = 2-amino-2-(pent-4-en-1-yl)hept-6-enoic acid, useful for stapling/stapled with another amino acid residue comprising an olefin group to form a staple through one of the two olefin groups and/or with another amino acid residue comprising an olefin group to form a staple through the other of the two olefin groups
  SITE 7: note = (S)-3-(2-amino-2-carboxyethyl)benzoic acid
  SITE 8: note = 2-amino-2-methylpropanoic acid
  SITE 11: note = L-lysine, useful for stapling/stapled with another amino acid residue comprising a side chain acid group to form a staple through the 6-amino group
  SITE 12: note (S)-3-amino-1-((pent-4-en-1-yloxy)carbonyl)pyrrolidine-3-ca rboxylic acid, useful for stapling/stapled with another amino acid residue comprising an olefin group to form a staple through the olefin group
  SITE 14: note = (S)-2-amino-3-(3,4-dichlorophenyl)propanoic acid
  SITE 15: note = L-glutamic acid, useful for stapling/stapled with another amino acid residue comprising a side chain amino group to form a staple through the 4-carboxyl group
  SITE 16: note = C-term amino
XADIXDXXAFKXFXEA

SEQ ID NO: 889 - protein, 15 aa, synthetic construct
  SITE 1: note = N-term Acetic Acid
  SITE 1: note = (S)-2-amino-2-methylhept-6-enoic acid, useful for stapling/stapled with another amino acid residue comprising an olefin group to form a staple through the olefin group
  VARIANT 5: note = 2-amino-2-(pent-4-en-1-yl)hept-6-enoic acid, useful for stapling/stapled with another amino acid residue comprising an olefin group to form a staple through one of the two olefin groups and/or with another amino acid residue comprising an olefin group to form a staple through the other of the two olefin groups
  SITE 7: note = (S)-3-(2-amino-2-carboxyethyl)benzoic acid
  SITE 8: note = 2-amino-2-methylpropanoic acid
  SITE 11: note = L-lysine, useful for stapling/stapled with another amino acid residue comprising a side chain acid group to form a staple through the 6-amino group
  SITE 12: note (S)-3-amino-1-((pent-4-en-1-yloxy)carbonyl)pyrrolidine-3-ca rboxylic acid, useful for stapling/stapled with another amino acid residue comprising an olefin group to form a staple through the olefin group
  SITE 14: note = (S)-2-amino-3-(3,4-dichlorophenyl)propanoic acid
  SITE 15: note = L-glutamic acid, useful for stapling/stapled with another amino acid residue comprising a side chain amino group to form a staple through the 4-carboxyl group
  SITE 15: note = C-term amino
XADIXDXXAFKXFXE

SEQ ID NO: 890 - protein, 16 aa, synthetic construct
  SITE 1: note = N-term Acetic Acid
  SITE 1: note = (S)-2-amino-2-methylhept-6-enoic acid, useful for stapling/stapled with another amino acid residue comprising an olefin group to form a staple through the olefin group
  VARIANT 5: note = 2-amino-2-(pent-4-en-1-yl)hept-6-enoic acid, useful for stapling/stapled with another amino acid residue comprising an olefin group to form a staple through one of the two olefin groups and/or with another amino acid residue comprising an olefin group to form a staple through the other of the two olefin groups
  SITE 7: note = (S)-3-(2-amino-2-carboxyethyl)benzoic acid
  SITE 8: note = 2-amino-2-methylpropanoic acid
  SITE 11: note = L-lysine, useful for stapling/stapled with another amino acid residue comprising a side chain acid group to form a staple through the 6-amino group
  SITE 12: note (S)-3-amino-1-((pent-4-en-1-yloxy)carbonyl)pyrrolidine-3-ca rboxylic acid, useful for stapling/stapled with another amino acid residue comprising an olefin group to form a staple through the olefin group
  SITE 14: note = (S)-2-amino-3-(3,4-dichlorophenyl)propanoic acid
  SITE 15: note = L-glutamic acid, useful for stapling/stapled with another amino acid residue comprising a side chain amino group to form a staple through the 4-carboxyl group
  SITE 16: note = C-term amino
XADAXDXXAFKXFXEA

SEQ ID NO: 891 - protein, 15 aa, synthetic construct
  SITE 1: note = N-term Acetic Acid
  SITE 1: note = (S)-2-amino-2-methylhept-6-enoic acid, useful for stapling/stapled with another amino acid residue comprising an olefin group to form a staple through the olefin group
  VARIANT 5: note = 2-amino-2-(pent-4-en-1-yl)hept-6-enoic acid, useful for stapling/stapled with another amino acid residue comprising an olefin group to form a staple through one of the two olefin groups and/or with another amino acid residue comprising an olefin group to form a staple through the other of the two olefin groups
  SITE 7: note = (S)-3-(2-amino-2-carboxyethyl)benzoic acid
  SITE 8: note = 2-amino-2-methylpropanoic acid
  SITE 11: note = L-lysine, useful for stapling/stapled with another amino acid residue comprising a side chain acid group to form a staple through the 6-amino group
  SITE 12: note (S)-3-amino-1-((pent-4-en-1-yloxy)carbonyl)pyrrolidine-3-ca rboxylic acid, useful for stapling/stapled with another amino acid residue comprising an olefin group to form a staple through the olefin group
  SITE 14: note = (S)-2-amino-3-(3,4-dichlorophenyl)propanoic acid
  SITE 15: note = L-glutamic acid, useful for stapling/stapled with another amino acid residue comprising a side chain amino group to form a staple through the 4-carboxyl group
  SITE 15: note = C-term amino
XADAXDXXAFKXFXE

SEQ ID NO: 892 - protein, 16 aa, synthetic construct
  SITE 1: note = N-term Acetic Acid
  SITE 1: note = (S)-2-amino-2-methylhept-6-enoic acid, useful for stapling/stapled with another amino acid residue comprising an olefin group to form a staple through the olefin group
  VARIANT 5: note = 2-amino-2-(pent-4-en-1-yl)hept-6-enoic acid, useful for stapling/stapled with another amino acid residue comprising an olefin group to form a staple through one of the two olefin groups and/or with another amino acid residue comprising an olefin group to form a staple through the other of the two olefin groups
  SITE 7: note = (S)-3-(2-amino-2-carboxyethyl)benzoic acid
  SITE 8: note = 2-amino-2-methylpropanoic acid
  SITE 11: note = L-lysine, useful for stapling/stapled with another amino acid residue comprising a side chain acid group to form a staple through the 6-amino group
  SITE 12: note (S)-3-amino-1-((pent-4-en-1-yloxy)carbonyl)pyrrolidine-3-ca rboxylic acid, useful for stapling/stapled with another amino acid residue comprising an olefin group to form a staple through the olefin group
  SITE 14: note = (S)-2-amino-3-(3,4-dichlorophenyl)propanoic acid
  SITE 15: note = L-glutamic acid, useful for stapling/stapled with another amino acid residue comprising a side chain amino group to form a staple through the 4-carboxyl group
  SITE 16: note = C-term amino
XADFXDXXAFKXFXEA

SEQ ID NO: 893 - protein, 15 aa, synthetic construct
  SITE 1: note = N-term Acetic Acid
  SITE 1: note = (S)-2-amino-2-methylhept-6-enoic acid, useful for stapling/stapled with another amino acid residue comprising an olefin group to form a staple through the olefin group
  VARIANT 5: note = 2-amino-2-(pent-4-en-1-yl)hept-6-enoic acid, useful for stapling/stapled with another amino acid residue comprising an olefin group to form a staple through one of the two olefin groups and/or with another amino acid residue comprising an olefin group to form a staple through the other of the two olefin groups
  SITE 7: note = (S)-3-(2-amino-2-carboxyethyl)benzoic acid
  SITE 8: note = 2-amino-2-methylpropanoic acid
  SITE 11: note = L-lysine, useful for stapling/stapled with another amino acid residue comprising a side chain acid group to form a staple through the 6-amino group
  SITE 12: note (S)-3-amino-1-((pent-4-en-1-yloxy)carbonyl)pyrrolidine-3-ca rboxylic acid, useful for stapling/stapled with another amino acid residue comprising an olefin group to form a staple through the olefin group
  SITE 14: note = (S)-2-amino-3-(3,4-dichlorophenyl)propanoic acid
  SITE 15: note = L-glutamic acid, useful for stapling/stapled with another amino acid residue comprising a side chain amino group to form a staple through the 4-carboxyl group
  SITE 15: note = C-term amino
XADFXDXXAFKXFXE

SEQ ID NO: 894 - protein, 16 aa, synthetic construct
  SITE 1: note = N-term Acetic Acid
  SITE 1: note = (S)-2-amino-2-methylhept-6-enoic acid, useful for stapling/stapled with another amino acid residue comprising an olefin group to form a staple through the olefin group
  VARIANT 5: note = 2-amino-2-(pent-4-en-1-yl)hept-6-enoic acid, useful for stapling/stapled with another amino acid residue comprising an olefin group to form a staple through one of the two olefin groups and/or with another amino acid residue comprising an olefin group to form a staple through the other of the two olefin groups
  SITE 7: note = (S)-3-(2-amino-2-carboxyethyl)benzoic acid
  SITE 11: note = L-lysine, useful for stapling/stapled with another amino acid residue comprising a side chain acid group to form a staple through the 6-amino group
  SITE 12: note (S)-3-amino-1-((pent-4-en-1-yloxy)carbonyl)pyrrolidine-3-ca rboxylic acid, useful for stapling/stapled with another amino acid residue comprising an olefin group to form a staple through the olefin group
  SITE 14: note = (S)-2-amino-3-(3,4-dichlorophenyl)propanoic acid
  SITE 15: note = L-glutamic acid, useful for stapling/stapled with another amino acid residue comprising a side chain amino group to form a staple through the 4-carboxyl group
  SITE 16: note = C-term amino
XADIXDXAAFKXFXEA

SEQ ID NO: 895 - protein, 15 aa, synthetic construct
  SITE 1: note = N-term Acetic Acid
  SITE 1: note = (S)-2-amino-2-methylhept-6-enoic acid, useful for stapling/stapled with another amino acid residue comprising an olefin group to form a staple through the olefin group
  VARIANT 5: note = 2-amino-2-(pent-4-en-1-yl)hept-6-enoic acid, useful for stapling/stapled with another amino acid residue comprising an olefin group to form a staple through one of the two olefin groups and/or with another amino acid residue comprising an olefin group to form a staple through the other of the two olefin groups
  SITE 7: note = (S)-3-(2-amino-2-carboxyethyl)benzoic acid
  SITE 11: note = L-lysine, useful for stapling/stapled with another amino acid residue comprising a side chain acid group to form a staple through the 6-amino group
  SITE 12: note (S)-3-amino-1-((pent-4-en-1-yloxy)carbonyl)pyrrolidine-3-ca rboxylic acid, useful for stapling/stapled with another amino acid residue comprising an olefin group to form a staple through the olefin group
  SITE 14: note = (S)-2-amino-3-(3,4-dichlorophenyl)propanoic acid
  SITE 15: note = L-glutamic acid, useful for stapling/stapled with another amino acid residue comprising a side chain amino group to form a staple through the 4-carboxyl group
  SITE 15: note = C-term amino
XADIXDXAAFKXFXE

SEQ ID NO: 896 - protein, 14 aa, synthetic construct
  SITE 1: note = N-term Acetic Acid
  SITE 1: note = (R)-2-allylpyrrolidine-2-carboxylic acid, useful for stapling/stapled with another amino acid residue comprising an olefin group to form a staple through the olefin group
  VARIANT 4: note = 2-amino-2-(pent-4-en-1-yl)hept-6-enoic acid, useful for stapling/stapled with another amino acid residue comprising an olefin group to form a staple through one of the two olefin groups and/or with another amino acid residue comprising an olefin group to form a staple through the other of the two olefin groups
  SITE 6: note = (S)-3-(2-amino-2-carboxyethyl)benzoic acid
  SITE 7: note = 4-amino-1-(3-methylbutanoyl)piperidine-4-carboxylic acid
  SITE 10: note = (S)-2-amino-6-(1H-1,2,3-triazol-1-yl)hexanoic acid, useful for stapling/stapled with another amino acid residue to form a staple through the 4-position of the triazolyl group
  SITE 11: note (S)-3-amino-1-((pent-4-en-1-yloxy)carbonyl)pyrrolidine-3-ca rboxylic acid, useful for stapling/stapled with another amino acid residue comprising an olefin group to form a staple through the olefin group
  SITE 13: note = (S)-2-amino-3-(3,4-dichlorophenyl)propanoic acid
  SITE 14: note = L-alanine, useful for stapling/stapled with another amino acid residue comprising a triazolyl group to form a staple through the terminal methyl group
  SITE 14: note = C-term amino
XDIXDXXAFXXFXA

SEQ ID NO: 897 - protein, 14 aa, synthetic construct
  SITE 1: note = N-term Acetic Acid
  SITE 1: note = (R)-2-allylpyrrolidine-2-carboxylic acid, useful for stapling/stapled with another amino acid residue comprising an olefin group to form a staple through the olefin group
  SITE 3: note = (S)-2-amino-4,4-dimethylpentanoic acid
  VARIANT 4: note = 2-amino-2-(pent-4-en-1-yl)hept-6-enoic acid, useful for stapling/stapled with another amino acid residue comprising an olefin group to form a staple through one of the two olefin groups and/or with another amino acid residue comprising an olefin group to form a staple through the other of the two olefin groups
  SITE 6: note = (S)-3-(2-amino-2-carboxyethyl)benzoic acid
  SITE 7: note = 2-amino-2-methylpropanoic acid
  SITE 10: note = L-lysine, useful for stapling/stapled with another amino acid residue comprising a side chain acid group to form a staple through the 6-amino group
  SITE 11: note (S)-3-amino-1-((pent-4-en-1-yloxy)carbonyl)pyrrolidine-3-ca rboxylic acid, useful for stapling/stapled with another amino acid residue comprising an olefin group to form a staple through the olefin group
  SITE 13: note = (S)-2-amino-3-(benzo[b]thiophen-3-yl)propanoic acid
  SITE 14: note = L-glutamic acid, useful for stapling/stapled with another amino acid residue comprising a side chain amino group to form a staple through the 4-carboxyl group
  SITE 14: note = C-term amino
XDXXDXXAFKXFXE

SEQ ID NO: 898 - protein, 14 aa, synthetic construct
  SITE 1: note = N-term Acetic Acid
  SITE 1: note = (R)-2-allylpyrrolidine-2-carboxylic acid, useful for stapling/stapled with another amino acid residue comprising an olefin group to form a staple through the olefin group
  SITE 3: note = (S)-2-amino-4,4-dimethylpentanoic acid
  VARIANT 4: note = 2-amino-2-(pent-4-en-1-yl)hept-6-enoic acid, useful for stapling/stapled with another amino acid residue comprising an olefin group to form a staple through one of the two olefin groups and/or with another amino acid residue comprising an olefin group to form a staple through the other of the two olefin groups
  SITE 6: note = (S)-3-(2-amino-2-carboxyethyl)benzoic acid
  SITE 10: note = L-lysine, useful for stapling/stapled with another amino acid residue comprising a side chain acid group to form a staple through the 6-amino group
  SITE 11: note (S)-3-amino-1-((pent-4-en-1-yloxy)carbonyl)pyrrolidine-3-ca rboxylic acid, useful for stapling/stapled with another amino acid residue comprising an olefin group to form a staple through the olefin group
  SITE 13: note = (S)-2-amino-3-(benzo[b]thiophen-3-yl)propanoic acid
  SITE 14: note = L-glutamic acid, useful for stapling/stapled with another amino acid residue comprising a side chain amino group to form a staple through the 4-carboxyl group
  SITE 14: note = C-term amino
XDXXDXAAFKXFXE

SEQ ID NO: 899 - protein, 15 aa, synthetic construct
  SITE 1: note = N-term Acetic Acid
  SITE 1: note = (R)-2-allylpyrrolidine-2-carboxylic acid, useful for stapling/stapled with another amino acid residue comprising an olefin group to form a staple through the olefin group
  SITE 3: note = (S)-2-amino-4,4-dimethylpentanoic acid
  VARIANT 4: note = 2-amino-2-(pent-4-en-1-yl)hept-6-enoic acid, useful for stapling/stapled with another amino acid residue comprising an olefin group to form a staple through one of the two olefin groups and/or with another amino acid residue comprising an olefin group to form a staple through the other of the two olefin groups
  SITE 6: note = (S)-3-(2-amino-2-carboxyethyl)benzoic acid
  SITE 10: note = L-lysine, useful for stapling/stapled with another amino acid residue comprising a side chain acid group to form a staple through the 6-amino group
  SITE 11: note (S)-3-amino-1-((pent-4-en-1-yloxy)carbonyl)pyrrolidine-3-ca rboxylic acid, useful for stapling/stapled with another amino acid residue comprising an olefin group to form a staple through the olefin group
  SITE 13: note = (S)-2-amino-3-(benzo[b]thiophen-3-yl)propanoic acid
  SITE 14: note = L-glutamic acid, useful for stapling/stapled with another amino acid residue comprising a side chain amino group to form a staple through the 4-carboxyl group
  SITE 15: note = C-term amino
XDXXDXAAFKXFXEA

SEQ ID NO: 900 - protein, 14 aa, synthetic construct
  SITE 1: note = N-term Acetic Acid
  SITE 1: note = (R)-2-allylpyrrolidine-2-carboxylic acid, useful for stapling/stapled with another amino acid residue comprising an olefin group to form a staple through the olefin group
  SITE 3: note = (S)-2-amino-4,4-dimethylpentanoic acid
  VARIANT 4: note = 2-amino-2-(pent-4-en-1-yl)hept-6-enoic acid, useful for stapling/stapled with another amino acid residue comprising an olefin group to form a staple through one of the two olefin groups and/or with another amino acid residue comprising an olefin group to form a staple through the other of the two olefin groups
  SITE 6: note = (S)-3-(2-amino-2-carboxyethyl)benzoic acid
  SITE 7: note = 2-amino-2-methylpropanoic acid
  SITE 10: note = L-lysine, useful for stapling/stapled with another amino acid residue comprising a side chain acid group to form a staple through the 6-amino group
  SITE 11: note (S)-3-amino-1-((pent-4-en-1-yloxy)carbonyl)pyrrolidine-3-ca rboxylic acid, useful for stapling/stapled with another amino acid residue comprising an olefin group to form a staple through the olefin group
  SITE 13: note (S)-2-amino-3-(7-fluorobenzo[b]thiophen-3-yl)propanoic acid
  SITE 14: note = L-glutamic acid, useful for stapling/stapled with another amino acid residue comprising a side chain amino group to form a staple through the 4-carboxyl group
  SITE 14: note = C-term amino
XDXXDXXAFKXFXE

SEQ ID NO: 901 - protein, 15 aa, synthetic construct
  SITE 1: note = N-term Acetic Acid
  SITE 1: note = (R)-2-allylpyrrolidine-2-carboxylic acid, useful for stapling/stapled with another amino acid residue comprising an olefin group to form a staple through the olefin group
  SITE 3: note = (S)-2-amino-4,4-dimethylpentanoic acid
  VARIANT 4: note = 2-amino-2-(pent-4-en-1-yl)hept-6-enoic acid, useful for stapling/stapled with another amino acid residue comprising an olefin group to form a staple through one of the two olefin groups and/or with another amino acid residue comprising an olefin group to form a staple through the other of the two olefin groups
  SITE 6: note = (S)-3-(2-amino-2-carboxyethyl)benzoic acid
  SITE 7: note = 2-amino-2-methylpropanoic acid
  SITE 10: note = L-lysine, useful for stapling/stapled with another amino acid residue comprising a side chain acid group to form a staple through the 6-amino group
  SITE 11: note (S)-3-amino-1-((pent-4-en-1-yloxy)carbonyl)pyrrolidine-3-ca rboxylic acid, useful for stapling/stapled with another amino acid residue comprising an olefin group to form a staple through the olefin group
  SITE 13: note (S)-2-amino-3-(7-fluorobenzo[b]thiophen-3-yl)propanoic acid
  SITE 14: note = L-glutamic acid, useful for stapling/stapled with another amino acid residue comprising a side chain amino group to form a staple through the 4-carboxyl group
  SITE 15: note = C-term amino
XDXXDXXAFKXFXEA

SEQ ID NO: 902 - protein, 14 aa, synthetic construct
  SITE 1: note = N-term Acetic Acid
  SITE 1: note = (R)-2-allylpyrrolidine-2-carboxylic acid, useful for stapling/stapled with another amino acid residue comprising an olefin group to form a staple through the olefin group
  SITE 3: note = (S)-2-amino-4,4-dimethylpentanoic acid
  VARIANT 4: note = 2-amino-2-(pent-4-en-1-yl)hept-6-enoic acid, useful for stapling/stapled with another amino acid residue comprising an olefin group to form a staple through one of the two olefin groups and/or with another amino acid residue comprising an olefin group to form a staple through the other of the two olefin groups
  SITE 6: note = (S)-3-(2-amino-2-carboxyethyl)benzoic acid
  SITE 7: note = 2-amino-2-methylpropanoic acid
  SITE 10: note = L-lysine, useful for stapling/stapled with another amino acid residue comprising a side chain acid group to form a staple through the 6-amino group
  SITE 11: note (S)-3-amino-1-((pent-4-en-1-yloxy)carbonyl)pyrrolidine-3-ca rboxylic acid, useful for stapling/stapled with another amino acid residue comprising an olefin group to form a staple through the olefin group
  SITE 13: note (S)-2-amino-3-(7-chlorobenzo[b]thiophen-3-yl)propanoic acid
  SITE 14: note = L-glutamic acid, useful for stapling/stapled with another amino acid residue comprising a side chain amino group to form a staple through the 4-carboxyl group
  SITE 14: note = C-term amino
XDXXDXXAFKXFXE

SEQ ID NO: 903 - protein, 15 aa, synthetic construct
  SITE 1: note = N-term Acetic Acid
  SITE 1: note = (R)-2-allylpyrrolidine-2-carboxylic acid, useful for stapling/stapled with another amino acid residue comprising an olefin group to form a staple through the olefin group
  SITE 3: note = (S)-2-amino-4,4-dimethylpentanoic acid
  VARIANT 4: note = 2-amino-2-(pent-4-en-1-yl)hept-6-enoic acid, useful for stapling/stapled with another amino acid residue comprising an olefin group to form a staple through one of the two olefin groups and/or with another amino acid residue comprising an olefin group to form a staple through the other of the two olefin groups
  SITE 6: note = (S)-3-(2-amino-2-carboxyethyl)benzoic acid
  SITE 7: note = 2-amino-2-methylpropanoic acid
  SITE 10: note = L-lysine, useful for stapling/stapled with another amino acid residue comprising a side chain acid group to form a staple through the 6-amino group
  SITE 11: note (S)-3-amino-1-((pent-4-en-1-yloxy)carbonyl)pyrrolidine-3-ca rboxylic acid, useful for stapling/stapled with another amino acid residue comprising an olefin group to form a staple through the olefin group
  SITE 13: note (S)-2-amino-3-(7-chlorobenzo[b]thiophen-3-yl)propanoic acid
  SITE 14: note = L-glutamic acid, useful for stapling/stapled with another amino acid residue comprising a side chain amino group to form a staple through the 4-carboxyl group
  SITE 15: note = C-term amino
XDXXDXXAFKXFXEA

SEQ ID NO: 904 - protein, 14 aa, synthetic construct
  SITE 1: note = N-term Acetic Acid
  SITE 1: note = (R)-2-allylpyrrolidine-2-carboxylic acid, useful for stapling/stapled with another amino acid residue comprising an olefin group to form a staple through the olefin group
  SITE 3: note = (S)-2-amino-4,4-dimethylpentanoic acid
  VARIANT 4: note = 2-amino-2-(pent-4-en-1-yl)hept-6-enoic acid, useful for stapling/stapled with another amino acid residue comprising an olefin group to form a staple through one of the two olefin groups and/or with another amino acid residue comprising an olefin group to form a staple through the other of the two olefin groups
  SITE 6: note = (S)-3-(2-amino-2-carboxyethyl)benzoic acid
  SITE 7: note = 2-amino-2-methylpropanoic acid
  SITE 10: note = L-lysine, useful for stapling/stapled with another amino acid residue comprising a side chain acid group to form a staple through the 6-amino group
  SITE 11: note (S)-3-amino-1-((pent-4-en-1-yloxy)carbonyl)pyrrolidine-3-ca rboxylic acid, useful for stapling/stapled with another amino acid residue comprising an olefin group to form a staple through the olefin group
  SITE 13: note (S)-2-amino-3-(7-methylbenzo[b]thiophen-3-yl)propanoic acid
  SITE 14: note = L-glutamic acid, useful for stapling/stapled with another amino acid residue comprising a side chain amino group to form a staple through the 4-carboxyl group
  SITE 14: note = C-term amino
XDXXDXXAFKXFXE

SEQ ID NO: 905 - protein, 15 aa, synthetic construct
  SITE 1: note = N-term Acetic Acid
  SITE 1: note = (R)-2-allylpyrrolidine-2-carboxylic acid, useful for stapling/stapled with another amino acid residue comprising an olefin group to form a staple through the olefin group
  SITE 3: note = (S)-2-amino-4,4-dimethylpentanoic acid
  VARIANT 4: note = 2-amino-2-(pent-4-en-1-yl)hept-6-enoic acid, useful for stapling/stapled with another amino acid residue comprising an olefin group to form a staple through one of the two olefin groups and/or with another amino acid residue comprising an olefin group to form a staple through the other of the two olefin groups
  SITE 6: note = (S)-3-(2-amino-2-carboxyethyl)benzoic acid
  SITE 7: note = 2-amino-2-methylpropanoic acid
  SITE 10: note = L-lysine, useful for stapling/stapled with another amino acid residue comprising a side chain acid group to form a staple through the 6-amino group
  SITE 11: note (S)-3-amino-1-((pent-4-en-1-yloxy)carbonyl)pyrrolidine-3-ca rboxylic acid, useful for stapling/stapled with another amino acid residue comprising an olefin group to form a staple through the olefin group
  SITE 13: note (S)-2-amino-3-(7-methylbenzo[b]thiophen-3-yl)propanoic acid
  SITE 14: note = L-glutamic acid, useful for stapling/stapled with another amino acid residue comprising a side chain amino group to form a staple through the 4-carboxyl group
  SITE 15: note = C-term amino
XDXXDXXAFKXFXEA

SEQ ID NO: 906 - protein, 17 aa, synthetic construct
  SITE 1: note = N-term Acetic Acid
  SITE 1: note = (R)-2-allylpyrrolidine-2-carboxylic acid, useful for stapling/stapled with another amino acid residue comprising an olefin group to form a staple through the olefin group
  VARIANT 4: note = 2-amino-2-(pent-4-en-1-yl)hept-6-enoic acid, useful for stapling/stapled with another amino acid residue comprising an olefin group to form a staple through one of the two olefin groups and/or with another amino acid residue comprising an olefin group to form a staple through the other of the two olefin groups
  SITE 6: note = (S)-3-(2-amino-2-carboxyethyl)benzoic acid
  SITE 7: note = 2-amino-2-methylpropanoic acid
  SITE 10: note = L-lysine, useful for stapling/stapled with another amino acid residue comprising a side chain acid group to form a staple through the 6-amino group
  SITE 11: note (S)-3-amino-1-((pent-4-en-1-yloxy)carbonyl)pyrrolidine-3-ca rboxylic acid, useful for stapling/stapled with another amino acid residue comprising an olefin group to form a staple through the olefin group
  SITE 13: note = (S)-2-amino-3-(3,4-dichlorophenyl)propanoic acid
  SITE 14: note = L-glutamic acid, useful for stapling/stapled with another amino acid residue comprising a side chain amino group to form a staple through the 4-carboxyl group
  SITE 17: note = C-term amino
XDIXDXXAFKXFXEVEA

SEQ ID NO: 907 - protein, 17 aa, synthetic construct
  SITE 1: note = N-term Acetic Acid
  SITE 1: note = (R)-2-allylpyrrolidine-2-carboxylic acid, useful for stapling/stapled with another amino acid residue comprising an olefin group to form a staple through the olefin group
  VARIANT 4: note = 2-amino-2-(pent-4-en-1-yl)hept-6-enoic acid, useful for stapling/stapled with another amino acid residue comprising an olefin group to form a staple through one of the two olefin groups and/or with another amino acid residue comprising an olefin group to form a staple through the other of the two olefin groups
  SITE 6: note = (S)-3-(2-amino-2-carboxyethyl)benzoic acid
  SITE 7: note = 2-amino-2-methylpropanoic acid
  SITE 10: note = L-lysine, useful for stapling/stapled with another amino acid residue comprising a side chain acid group to form a staple through the 6-amino group
  SITE 11: note (S)-3-amino-1-((pent-4-en-1-yloxy)carbonyl)pyrrolidine-3-ca rboxylic acid, useful for stapling/stapled with another amino acid residue comprising an olefin group to form a staple through the olefin group
  SITE 13: note = (S)-2-amino-3-(3,4-dichlorophenyl)propanoic acid
  SITE 14: note = L-glutamic acid, useful for stapling/stapled with another amino acid residue comprising a side chain amino group to form a staple through the 4-carboxyl group
  SITE 17: note = C-term amino
XDIXDXXAFKXFXEVEL

SEQ ID NO: 908 - protein, 17 aa, synthetic construct
  SITE 1: note = N-term Acetic Acid
  SITE 1: note = (R)-2-allylpyrrolidine-2-carboxylic acid, useful for stapling/stapled with another amino acid residue comprising an olefin group to form a staple through the olefin group
  VARIANT 4: note = 2-amino-2-(pent-4-en-1-yl)hept-6-enoic acid, useful for stapling/stapled with another amino acid residue comprising an olefin group to form a staple through one of the two olefin groups and/or with another amino acid residue comprising an olefin group to form a staple through the other of the two olefin groups
  SITE 6: note = (S)-3-(2-amino-2-carboxyethyl)benzoic acid
  SITE 7: note = 2-amino-2-methylpropanoic acid
  SITE 10: note = L-lysine, useful for stapling/stapled with another amino acid residue comprising a side chain acid group to form a staple through the 6-amino group
  SITE 11: note (S)-3-amino-1-((pent-4-en-1-yloxy)carbonyl)pyrrolidine-3-ca rboxylic acid, useful for stapling/stapled with another amino acid residue comprising an olefin group to form a staple through the olefin group
  SITE 13: note = (S)-2-amino-3-(3,4-dichlorophenyl)propanoic acid
  SITE 14: note = L-glutamic acid, useful for stapling/stapled with another amino acid residue comprising a side chain amino group to form a staple through the 4-carboxyl group
  SITE 17: note = C-term amino
XDIXDXXAFKXFXEVTA

SEQ ID NO: 909 - protein, 17 aa, synthetic construct
  SITE 1: note = N-term Acetic Acid
  SITE 1: note = (R)-2-allylpyrrolidine-2-carboxylic acid, useful for stapling/stapled with another amino acid residue comprising an olefin group to form a staple through the olefin group
  VARIANT 4: note = 2-amino-2-(pent-4-en-1-yl)hept-6-enoic acid, useful for stapling/stapled with another amino acid residue comprising an olefin group to form a staple through one of the two olefin groups and/or with another amino acid residue comprising an olefin group to form a staple through the other of the two olefin groups
  SITE 6: note = (S)-3-(2-amino-2-carboxyethyl)benzoic acid
  SITE 7: note = 1-aminocyclopentane-1-carboxylic acid
  SITE 10: note = L-lysine, useful for stapling/stapled with another amino acid residue comprising a side chain acid group to form a staple through the 6-amino group
  SITE 11: note (S)-3-amino-1-((pent-4-en-1-yloxy)carbonyl)pyrrolidine-3-ca rboxylic acid, useful for stapling/stapled with another amino acid residue comprising an olefin group to form a staple through the olefin group
  SITE 13: note = (S)-2-amino-3-(3,4-dichlorophenyl)propanoic acid
  SITE 14: note = L-glutamic acid, useful for stapling/stapled with another amino acid residue comprising a side chain amino group to form a staple through the 4-carboxyl group
  SITE 17: note = C-term amino
XDIXDXXAFKXFXEVEA

SEQ ID NO: 910 - protein, 17 aa, synthetic construct
  SITE 1: note = N-term Acetic Acid
  SITE 1: note = (R)-2-allylpyrrolidine-2-carboxylic acid, useful for stapling/stapled with another amino acid residue comprising an olefin group to form a staple through the olefin group
  VARIANT 4: note = 2-amino-2-(pent-4-en-1-yl)hept-6-enoic acid, useful for stapling/stapled with another amino acid residue comprising an olefin group to form a staple through one of the two olefin groups and/or with another amino acid residue comprising an olefin group to form a staple through the other of the two olefin groups
  SITE 6: note = (S)-3-(2-amino-2-carboxyethyl)benzoic acid
  SITE 7: note = 1-aminocyclopentane-1-carboxylic acid
  SITE 10: note = L-lysine, useful for stapling/stapled with another amino acid residue comprising a side chain acid group to form a staple through the 6-amino group
  SITE 11: note (S)-3-amino-1-((pent-4-en-1-yloxy)carbonyl)pyrrolidine-3-ca rboxylic acid, useful for stapling/stapled with another amino acid residue comprising an olefin group to form a staple through the olefin group
  SITE 13: note = (S)-2-amino-3-(3,4-dichlorophenyl)propanoic acid
  SITE 14: note = L-glutamic acid, useful for stapling/stapled with another amino acid residue comprising a side chain amino group to form a staple through the 4-carboxyl group
  SITE 17: note = C-term amino
XDIXDXXAFKXFXEVEL

SEQ ID NO: 911 - protein, 17 aa, synthetic construct
  SITE 1: note = N-term Acetic Acid
  SITE 1: note = (R)-2-allylpyrrolidine-2-carboxylic acid, useful for stapling/stapled with another amino acid residue comprising an olefin group to form a staple through the olefin group
  VARIANT 4: note = 2-amino-2-(pent-4-en-1-yl)hept-6-enoic acid, useful for stapling/stapled with another amino acid residue comprising an olefin group to form a staple through one of the two olefin groups and/or with another amino acid residue comprising an olefin group to form a staple through the other of the two olefin groups
  SITE 6: note = (S)-3-(2-amino-2-carboxyethyl)benzoic acid
  SITE 7: note = 1-aminocyclopentane-1-carboxylic acid
  SITE 10: note = L-lysine, useful for stapling/stapled with another amino acid residue comprising a side chain acid group to form a staple through the 6-amino group
  SITE 11: note (S)-3-amino-1-((pent-4-en-1-yloxy)carbonyl)pyrrolidine-3-ca rboxylic acid, useful for stapling/stapled with another amino acid residue comprising an olefin group to form a staple through the olefin group
  SITE 13: note = (S)-2-amino-3-(3,4-dichlorophenyl)propanoic acid
  SITE 14: note = L-glutamic acid, useful for stapling/stapled with another amino acid residue comprising a side chain amino group to form a staple through the 4-carboxyl group
  SITE 17: note = C-term amino
XDIXDXXAFKXFXEVTA

SEQ ID NO: 912 - protein, 17 aa, synthetic construct
  SITE 1: note = N-term Acetic Acid
  SITE 1: note = (R)-2-allylpyrrolidine-2-carboxylic acid, useful for stapling/stapled with another amino acid residue comprising an olefin group to form a staple through the olefin group
  VARIANT 4: note = 2-amino-2-(pent-4-en-1-yl)hept-6-enoic acid, useful for stapling/stapled with another amino acid residue comprising an olefin group to form a staple through one of the two olefin groups and/or with another amino acid residue comprising an olefin group to form a staple through the other of the two olefin groups
  SITE 6: note = (S)-3-(2-amino-2-carboxyethyl)benzoic acid
  SITE 7: note = 2-amino-2-methylpropanoic acid
  SITE 10: note = L-lysine, useful for stapling/stapled with another amino acid residue comprising a side chain acid group to form a staple through the 6-amino group
  SITE 11: note (S)-3-amino-1-((pent-4-en-1-yloxy)carbonyl)pyrrolidine-3-ca rboxylic acid, useful for stapling/stapled with another amino acid residue comprising an olefin group to form a staple through the olefin group
  SITE 12: note = (S)-2-amino-3-(thiophen-3-yl)propanoic acid
  SITE 13: note = (S)-2-amino-3-(3,4-dichlorophenyl)propanoic acid
  SITE 14: note = L-glutamic acid, useful for stapling/stapled with another amino acid residue comprising a side chain amino group to form a staple through the 4-carboxyl group
  SITE 17: note = C-term amino
XDIXDXXAFKXXXEVEA

SEQ ID NO: 913 - protein, 17 aa, synthetic construct
  SITE 1: note = N-term Acetic Acid
  SITE 1: note = (R)-2-allylpyrrolidine-2-carboxylic acid, useful for stapling/stapled with another amino acid residue comprising an olefin group to form a staple through the olefin group
  VARIANT 4: note = 2-amino-2-(pent-4-en-1-yl)hept-6-enoic acid, useful for stapling/stapled with another amino acid residue comprising an olefin group to form a staple through one of the two olefin groups and/or with another amino acid residue comprising an olefin group to form a staple through the other of the two olefin groups
  SITE 6: note = (S)-3-(2-amino-2-carboxyethyl)benzoic acid
  SITE 7: note = 2-amino-2-methylpropanoic acid
  SITE 10: note = L-lysine, useful for stapling/stapled with another amino acid residue comprising a side chain acid group to form a staple through the 6-amino group
  SITE 11: note (S)-3-amino-1-((pent-4-en-1-yloxy)carbonyl)pyrrolidine-3-ca rboxylic acid, useful for stapling/stapled with another amino acid residue comprising an olefin group to form a staple through the olefin group
  SITE 12: note = (S)-2-amino-3-(thiophen-3-yl)propanoic acid
  SITE 13: note = (S)-2-amino-3-(3,4-dichlorophenyl)propanoic acid
  SITE 14: note = L-glutamic acid, useful for stapling/stapled with another amino acid residue comprising a side chain amino group to form a staple through the 4-carboxyl group
  SITE 17: note = C-term amino
XDIXDXXAFKXXXEVEL

SEQ ID NO: 914 - protein, 17 aa, synthetic construct
  SITE 1: note = N-term Acetic Acid
  SITE 1: note = (R)-2-allylpyrrolidine-2-carboxylic acid, useful for stapling/stapled with another amino acid residue comprising an olefin group to form a staple through the olefin group
  VARIANT 4: note = 2-amino-2-(pent-4-en-1-yl)hept-6-enoic acid, useful for stapling/stapled with another amino acid residue comprising an olefin group to form a staple through one of the two olefin groups and/or with another amino acid residue comprising an olefin group to form a staple through the other of the two olefin groups
  SITE 6: note = (S)-3-(2-amino-2-carboxyethyl)benzoic acid
  SITE 7: note = 2-amino-2-methylpropanoic acid
  SITE 10: note = L-lysine, useful for stapling/stapled with another amino acid residue comprising a side chain acid group to form a staple through the 6-amino group
  SITE 11: note (S)-3-amino-1-((pent-4-en-1-yloxy)carbonyl)pyrrolidine-3-ca rboxylic acid, useful for stapling/stapled with another amino acid residue comprising an olefin group to form a staple through the olefin group
  SITE 12: note = (S)-2-amino-3-(thiophen-3-yl)propanoic acid
  SITE 13: note = (S)-2-amino-3-(3,4-dichlorophenyl)propanoic acid
  SITE 14: note = L-glutamic acid, useful for stapling/stapled with another amino acid residue comprising a side chain amino group to form a staple through the 4-carboxyl group
  SITE 17: note = C-term amino
XDIXDXXAFKXXXEVTA

SEQ ID NO: 915 - protein, 17 aa, synthetic construct
  SITE 1: note = N-term Acetic Acid
  SITE 1: note = (R)-2-allylpyrrolidine-2-carboxylic acid, useful for stapling/stapled with another amino acid residue comprising an olefin group to form a staple through the olefin group
  VARIANT 4: note = 2-amino-2-(pent-4-en-1-yl)hept-6-enoic acid, useful for stapling/stapled with another amino acid residue comprising an olefin group to form a staple through one of the two olefin groups and/or with another amino acid residue comprising an olefin group to form a staple through the other of the two olefin groups
  SITE 6: note = (S)-3-(2-amino-2-carboxyethyl)benzoic acid
  SITE 7: note = 1-aminocyclopentane-1-carboxylic acid
  SITE 10: note = L-lysine, useful for stapling/stapled with another amino acid residue comprising a side chain acid group to form a staple through the 6-amino group
  SITE 11: note (S)-3-amino-1-((pent-4-en-1-yloxy)carbonyl)pyrrolidine-3-ca rboxylic acid, useful for stapling/stapled with another amino acid residue comprising an olefin group to form a staple through the olefin group
  SITE 12: note = (S)-2-amino-3-(thiophen-3-yl)propanoic acid
  SITE 13: note = (S)-2-amino-3-(3,4-dichlorophenyl)propanoic acid
  SITE 14: note = L-glutamic acid, useful for stapling/stapled with another amino acid residue comprising a side chain amino group to form a staple through the 4-carboxyl group
  SITE 17: note = C-term amino
XDIXDXXAFKXXXEVEA

SEQ ID NO: 916 - protein, 17 aa, synthetic construct
  SITE 1: note = N-term Acetic Acid
  SITE 1: note = (R)-2-allylpyrrolidine-2-carboxylic acid, useful for stapling/stapled with another amino acid residue comprising an olefin group to form a staple through the olefin group
  VARIANT 4: note = 2-amino-2-(pent-4-en-1-yl)hept-6-enoic acid, useful for stapling/stapled with another amino acid residue comprising an olefin group to form a staple through one of the two olefin groups and/or with another amino acid residue comprising an olefin group to form a staple through the other of the two olefin groups
  SITE 6: note = (S)-3-(2-amino-2-carboxyethyl)benzoic acid
  SITE 7: note = 1-aminocyclopentane-1-carboxylic acid
  SITE 10: note = L-lysine, useful for stapling/stapled with another amino acid residue comprising a side chain acid group to form a staple through the 6-amino group
  SITE 11: note (S)-3-amino-1-((pent-4-en-1-yloxy)carbonyl)pyrrolidine-3-ca rboxylic acid, useful for stapling/stapled with another amino acid residue comprising an olefin group to form a staple through the olefin group
  SITE 12: note = (S)-2-amino-3-(thiophen-3-yl)propanoic acid
  SITE 13: note = (S)-2-amino-3-(3,4-dichlorophenyl)propanoic acid
  SITE 14: note = L-glutamic acid, useful for stapling/stapled with another amino acid residue comprising a side chain amino group to form a staple through the 4-carboxyl group
  SITE 17: note = C-term amino
XDIXDXXAFKXXXEVEL

SEQ ID NO: 917 - protein, 17 aa, synthetic construct
  SITE 1: note = N-term Acetic Acid
  SITE 1: note = (R)-2-allylpyrrolidine-2-carboxylic acid, useful for stapling/stapled with another amino acid residue comprising an olefin group to form a staple through the olefin group
  VARIANT 4: note = 2-amino-2-(pent-4-en-1-yl)hept-6-enoic acid, useful for stapling/stapled with another amino acid residue comprising an olefin group to form a staple through one of the two olefin groups and/or with another amino acid residue comprising an olefin group to form a staple through the other of the two olefin groups
  SITE 6: note = (S)-3-(2-amino-2-carboxyethyl)benzoic acid
  SITE 7: note = 1-aminocyclopentane-1-carboxylic acid
  SITE 10: note = L-lysine, useful for stapling/stapled with another amino acid residue comprising a side chain acid group to form a staple through the 6-amino group
  SITE 11: note (S)-3-amino-1-((pent-4-en-1-yloxy)carbonyl)pyrrolidine-3-ca rboxylic acid, useful for stapling/stapled with another amino acid residue comprising an olefin group to form a staple through the olefin group
  SITE 12: note = (S)-2-amino-3-(thiophen-3-yl)propanoic acid
  SITE 13: note = (S)-2-amino-3-(3,4-dichlorophenyl)propanoic acid
  SITE 14: note = L-glutamic acid, useful for stapling/stapled with another amino acid residue comprising a side chain amino group to form a staple through the 4-carboxyl group
  SITE 17: note = C-term amino
XDIXDXXAFKXXXEVTA

SEQ ID NO: 918 - protein, 15 aa, synthetic construct
  SITE 1: note = N-term Acetic Acid
  SITE 1: note = (R)-2-allylpyrrolidine-2-carboxylic acid, useful for stapling/stapled with another amino acid residue comprising an olefin group to form a staple through the olefin group
  SITE 3: note = (S)-2-amino-4,4-dimethylpentanoic acid
  VARIANT 4: note = 2-amino-2-(pent-4-en-1-yl)hept-6-enoic acid, useful for stapling/stapled with another amino acid residue comprising an olefin group to form a staple through one of the two olefin groups and/or with another amino acid residue comprising an olefin group to form a staple through the other of the two olefin groups
  SITE 6: note = (S)-3-(2-amino-2-carboxyethyl)benzoic acid
  SITE 7: note = 2-amino-2-methylpropanoic acid
  SITE 10: note = L-homocysteine, sulfur bonded to the methyl at position 3 of bis(methyl)-1,1'-biphenyl, useful for stapling/stapled with another thiol through the methyl at position 3? of bis(methyl)-1,1'-biphenyl
  SITE 11: note (S)-3-amino-1-((pent-4-en-1-yloxy)carbonyl)pyrrolidine-3-ca rboxylic acid, useful for stapling/stapled with another amino acid residue comprising an olefin group to form a staple through the olefin group
  SITE 12: note = (S)-2-amino-3-(thiophen-3-yl)propanoic acid
  SITE 13: note = (S)-2-amino-3-(benzo[b]thiophen-3-yl)propanoic acid
  SITE 15: note = C-term amino
XDXXDXXAFCXXXCA

SEQ ID NO: 919 - protein, 15 aa, synthetic construct
  SITE 1: note = N-term Acetic Acid
  SITE 1: note = (R)-2-allylpyrrolidine-2-carboxylic acid, useful for stapling/stapled with another amino acid residue comprising an olefin group to form a staple through the olefin group
  SITE 3: note = (S)-2-amino-4,4-dimethylpentanoic acid
  VARIANT 4: note = 2-amino-2-(pent-4-en-1-yl)hept-6-enoic acid, useful for stapling/stapled with another amino acid residue comprising an olefin group to form a staple through one of the two olefin groups and/or with another amino acid residue comprising an olefin group to form a staple through the other of the two olefin groups
  SITE 6: note = (S)-3-(2-amino-2-carboxyethyl)benzoic acid
  SITE 7: note = 2-amino-2-methylpropanoic acid
  SITE 10: note = L-homocysteine, sulfur bonded to the methyl at position 2 of bis(methyl)naphthalene, useful for stapling/stapled with another thiol through the methyl at position 6 of bis(methyl)naphthalene
  SITE 11: note (S)-3-amino-1-((pent-4-en-1-yloxy)carbonyl)pyrrolidine-3-ca rboxylic acid, useful for stapling/stapled with another amino acid residue comprising an olefin group to form a staple through the olefin group
  SITE 12: note = (S)-2-amino-3-(thiophen-3-yl)propanoic acid
  SITE 13: note = (S)-2-amino-3-(benzo[b]thiophen-3-yl)propanoic acid
  SITE 15: note = C-term amino
XDXXDXXAFCXXXCA

SEQ ID NO: 920 - protein, 15 aa, synthetic construct
  SITE 1: note = N-term Acetic Acid
  SITE 1: note = (R)-2-allylpyrrolidine-2-carboxylic acid, useful for stapling/stapled with another amino acid residue comprising an olefin group to form a staple through the olefin group
  SITE 3: note = (S)-2-amino-4,4-dimethylpentanoic acid
  VARIANT 4: note = 2-amino-2-(pent-4-en-1-yl)hept-6-enoic acid, useful for stapling/stapled with another amino acid residue comprising an olefin group to form a staple through one of the two olefin groups and/or with another amino acid residue comprising an olefin group to form a staple through the other of the two olefin groups
  SITE 6: note = (S)-3-(2-amino-2-carboxyethyl)benzoic acid
  SITE 7: note = 2-amino-2-methylpropanoic acid
  SITE 10: note = Cysteine, sulfur bonded to the methyl at position 2 of 2,6-dimethylpyridine, useful for stapling/stapled with another thiol through the methyl position 6 of 2,6-dimethylpyridine
  SITE 11: note (S)-3-amino-1-((pent-4-en-1-yloxy)carbonyl)pyrrolidine-3-ca rboxylic acid, useful for stapling/stapled with another amino acid residue comprising an olefin group to form a staple through the olefin group
  SITE 12: note = (S)-2-amino-3-(thiophen-3-yl)propanoic acid
  SITE 13: note = (S)-2-amino-3-(benzo[b]thiophen-3-yl)propanoic acid
  SITE 15: note = C-term amino
XDXXDXXAFCXXXCA

SEQ ID NO: 921 - protein, 15 aa, synthetic construct
  SITE 1: note = N-term Acetic Acid
  SITE 1: note = (R)-2-allylpyrrolidine-2-carboxylic acid, useful for stapling/stapled with another amino acid residue comprising an olefin group to form a staple through the olefin group
  SITE 3: note = (S)-2-amino-4,4-dimethylpentanoic acid
  VARIANT 4: note = 2-amino-2-(pent-4-en-1-yl)hept-6-enoic acid, useful for stapling/stapled with another amino acid residue comprising an olefin group to form a staple through one of the two olefin groups and/or with another amino acid residue comprising an olefin group to form a staple through the other of the two olefin groups
  SITE 6: note = (S)-3-(2-amino-2-carboxyethyl)benzoic acid
  SITE 7: note = 2-amino-2-methylpropanoic acid
  SITE 10: note = Cysteine, sulfur bonded to the methyl at position 1 of 1,3-dimethylbenzene, useful for stapling/stapled with another thiol through the methyl at position 3 of 1,3-dimethylbenzene
  SITE 11: note (S)-3-amino-1-((pent-4-en-1-yloxy)carbonyl)pyrrolidine-3-ca rboxylic acid, useful for stapling/stapled with another amino acid residue comprising an olefin group to form a staple through the olefin group
  SITE 12: note = (S)-2-amino-3-(thiophen-3-yl)propanoic acid
  SITE 13: note = (S)-2-amino-3-(benzo[b]thiophen-3-yl)propanoic acid
  SITE 15: note = C-term amino
XDXXDXXAFCXXXCA

SEQ ID NO: 922 - protein, 15 aa, synthetic construct
  SITE 1: note = N-term Acetic Acid
  SITE 1: note = (R)-2-allylpyrrolidine-2-carboxylic acid, useful for stapling/stapled with another amino acid residue comprising an olefin group to form a staple through the olefin group
  SITE 3: note = (S)-2-amino-4,4-dimethylpentanoic acid
  VARIANT 4: note = 2-amino-2-(pent-4-en-1-yl)hept-6-enoic acid, useful for stapling/stapled with another amino acid residue comprising an olefin group to form a staple through one of the two olefin groups and/or with another amino acid residue comprising an olefin group to form a staple through the other of the two olefin groups
  SITE 6: note = (S)-3-(2-amino-2-carboxyethyl)benzoic acid
  SITE 7: note = 2-amino-2-methylpropanoic acid
  SITE 10: note = L-homocysteine, sulfur bonded to the methyl at position 2 of 2,6-dimethylpyridine, useful for stapling/stapled with another thiol through the methyl position 6 of 2,6-dimethylpyridine
  SITE 11: note (S)-3-amino-1-((pent-4-en-1-yloxy)carbonyl)pyrrolidine-3-ca rboxylic acid, useful for stapling/stapled with another amino acid residue comprising an olefin group to form a staple through the olefin group
  SITE 12: note = (S)-2-amino-3-(thiophen-3-yl)propanoic acid
  SITE 13: note = (S)-2-amino-3-(benzo[b]thiophen-3-yl)propanoic acid
  SITE 15: note = C-term amino
XDXXDXXAFCXXXCA

SEQ ID NO: 923 - protein, 15 aa, synthetic construct
  SITE 1: note = N-term Acetic Acid
  SITE 1: note = (R)-2-allylpyrrolidine-2-carboxylic acid, useful for stapling/stapled with another amino acid residue comprising an olefin group to form a staple through the olefin group
  SITE 3: note = (S)-2-amino-4,4-dimethylpentanoic acid
  VARIANT 4: note = 2-amino-2-(pent-4-en-1-yl)hept-6-enoic acid, useful for stapling/stapled with another amino acid residue comprising an olefin group to form a staple through one of the two olefin groups and/or with another amino acid residue comprising an olefin group to form a staple through the other of the two olefin groups
  SITE 6: note = (S)-3-(2-amino-2-carboxyethyl)benzoic acid
  SITE 7: note = 2-amino-2-methylpropanoic acid
  SITE 10: note = Cysteine, sulfur bonded to position 1 of propane, useful for stapling/stapled with another thiol through position 3 of propane
  SITE 11: note (S)-3-amino-1-((pent-4-en-1-yloxy)carbonyl)pyrrolidine-3-ca rboxylic acid, useful for stapling/stapled with another amino acid residue comprising an olefin group to form a staple through the olefin group
  SITE 12: note = (S)-2-amino-3-(thiophen-3-yl)propanoic acid
  SITE 13: note = (S)-2-amino-3-(benzo[b]thiophen-3-yl)propanoic acid
  SITE 15: note = C-term amino
XDXXDXXAFCXXXCA

SEQ ID NO: 924 - protein, 15 aa, synthetic construct
  SITE 1: note = N-term Acetic Acid
  SITE 1: note = (R)-2-allylpyrrolidine-2-carboxylic acid, useful for stapling/stapled with another amino acid residue comprising an olefin group to form a staple through the olefin group
  SITE 3: note = (S)-2-amino-4,4-dimethylpentanoic acid
  VARIANT 4: note = 2-amino-2-(pent-4-en-1-yl)hept-6-enoic acid, useful for stapling/stapled with another amino acid residue comprising an olefin group to form a staple through one of the two olefin groups and/or with another amino acid residue comprising an olefin group to form a staple through the other of the two olefin groups
  SITE 6: note = (S)-3-(2-amino-2-carboxyethyl)benzoic acid
  SITE 7: note = 2-amino-2-methylpropanoic acid
  SITE 10: note = Cysteine, sulfur bonded to position 1 of butane, useful for stapling/stapled with another thiol through position 4 of butane
  SITE 11: note (S)-3-amino-1-((pent-4-en-1-yloxy)carbonyl)pyrrolidine-3-ca rboxylic acid, useful for stapling/stapled with another amino acid residue comprising an olefin group to form a staple through the olefin group
  SITE 12: note = (S)-2-amino-3-(thiophen-3-yl)propanoic acid
  SITE 13: note = (S)-2-amino-3-(benzo[b]thiophen-3-yl)propanoic acid
  SITE 15: note = C-term amino
XDXXDXXAFCXXXCA

SEQ ID NO: 925 - protein, 15 aa, synthetic construct
  SITE 1: note = N-term Acetic Acid
  SITE 1: note = (R)-2-allylpyrrolidine-2-carboxylic acid, useful for stapling/stapled with another amino acid residue comprising an olefin group to form a staple through the olefin group
  SITE 3: note = (S)-2-amino-4,4-dimethylpentanoic acid
  VARIANT 4: note = 2-amino-2-(pent-4-en-1-yl)hept-6-enoic acid, useful for stapling/stapled with another amino acid residue comprising an olefin group to form a staple through one of the two olefin groups and/or with another amino acid residue comprising an olefin group to form a staple through the other of the two olefin groups
  SITE 6: note = (S)-3-(2-amino-2-carboxyethyl)benzoic acid
  SITE 7: note = 2-amino-2-methylpropanoic acid
  SITE 10: note = L-homocysteine, sulfur bonded to a methyl at position 3 of bis(methyl)oxetane, useful for stapling/stapled with another thiol through the other methyl at position 3 of bis(methyl)oxetane
  SITE 11: note (S)-3-amino-1-((pent-4-en-1-yloxy)carbonyl)pyrrolidine-3-ca rboxylic acid, useful for stapling/stapled with another amino acid residue comprising an olefin group to form a staple through the olefin group
  SITE 12: note = (S)-2-amino-3-(thiophen-3-yl)propanoic acid
  SITE 13: note = (S)-2-amino-3-(benzo[b]thiophen-3-yl)propanoic acid
  SITE 15: note = C-term amino
XDXXDXXAFCXXXCA

SEQ ID NO: 926 - protein, 15 aa, synthetic construct
  SITE 1: note = N-term Acetic Acid
  SITE 1: note = (R)-2-allylpyrrolidine-2-carboxylic acid, useful for stapling/stapled with another amino acid residue comprising an olefin group to form a staple through the olefin group
  SITE 3: note = (S)-2-amino-4,4-dimethylpentanoic acid
  VARIANT 4: note = 2-amino-2-(pent-4-en-1-yl)hept-6-enoic acid, useful for stapling/stapled with another amino acid residue comprising an olefin group to form a staple through one of the two olefin groups and/or with another amino acid residue comprising an olefin group to form a staple through the other of the two olefin groups
  SITE 6: note = (S)-3-(2-amino-2-carboxyethyl)benzoic acid
  SITE 7: note = 2-amino-2-methylpropanoic acid
  SITE 10: note = Cysteine, sulfur bonded to a methyl at position 3 of bis(methyl)oxetane, useful for stapling/stapled with another thiol through the other methyl at position 3 of bis(methyl)oxetane
  SITE 11: note (S)-3-amino-1-((pent-4-en-1-yloxy)carbonyl)pyrrolidine-3-ca rboxylic acid, useful for stapling/stapled with another amino acid residue comprising an olefin group to form a staple through the olefin group
  SITE 12: note = (S)-2-amino-3-(thiophen-3-yl)propanoic acid
  SITE 13: note = (S)-2-amino-3-(benzo[b]thiophen-3-yl)propanoic acid
  SITE 15: note = C-term amino
XDXXDXXAFCXXXCA

SEQ ID NO: 927 - protein, 15 aa, synthetic construct
  SITE 1: note = N-term Acetic Acid
  SITE 1: note = (R)-2-allylpyrrolidine-2-carboxylic acid, useful for stapling/stapled with another amino acid residue comprising an olefin group to form a staple through the olefin group
  SITE 3: note = (S)-2-amino-4,4-dimethylpentanoic acid
  VARIANT 4: note = 2-amino-2-(pent-4-en-1-yl)hept-6-enoic acid, useful for stapling/stapled with another amino acid residue comprising an olefin group to form a staple through one of the two olefin groups and/or with another amino acid residue comprising an olefin group to form a staple through the other of the two olefin groups
  SITE 6: note = (S)-3-(2-amino-2-carboxyethyl)benzoic acid
  SITE 7: note = 2-amino-2-methylpropanoic acid
  SITE 10: note = Cysteine, sulfur bonded to position 1 of but-2-ene, useful for stapling/stapled with another thiol through position 4 of but-2-ene
  SITE 11: note (S)-3-amino-1-((pent-4-en-1-yloxy)carbonyl)pyrrolidine-3-ca rboxylic acid, useful for stapling/stapled with another amino acid residue comprising an olefin group to form a staple through the olefin group
  SITE 12: note = (S)-2-amino-3-(thiophen-3-yl)propanoic acid
  SITE 13: note = (S)-2-amino-3-(benzo[b]thiophen-3-yl)propanoic acid
  SITE 15: note = C-term amino
XDXXDXXAFCXXXCA

SEQ ID NO: 928 - protein, 15 aa, synthetic construct
  SITE 1: note = N-term Acetic Acid
  SITE 1: note = (R)-2-allylpyrrolidine-2-carboxylic acid, useful for stapling/stapled with another amino acid residue comprising an olefin group to form a staple through the olefin group
  SITE 3: note = (S)-2-amino-4,4-dimethylpentanoic acid
  VARIANT 4: note = 2-amino-2-(pent-4-en-1-yl)hept-6-enoic acid, useful for stapling/stapled with another amino acid residue comprising an olefin group to form a staple through one of the two olefin groups and/or with another amino acid residue comprising an olefin group to form a staple through the other of the two olefin groups
  SITE 6: note = (S)-3-(2-amino-2-carboxyethyl)benzoic acid
  SITE 7: note = 2-amino-2-methylpropanoic acid
  SITE 10: note = L-homocysteine, sulfur bonded to position 1 of propane, useful for stapling/stapled with another thiol through position 3 of propane
  SITE 11: note (S)-3-amino-1-((pent-4-en-1-yloxy)carbonyl)pyrrolidine-3-ca rboxylic acid, useful for stapling/stapled with another amino acid residue comprising an olefin group to form a staple through the olefin group
  SITE 12: note = (S)-2-amino-3-(thiophen-3-yl)propanoic acid
  SITE 13: note = (S)-2-amino-3-(benzo[b]thiophen-3-yl)propanoic acid
  SITE 15: note = C-term amino
XDXXDXXAFCXXXCA

SEQ ID NO: 929 - protein, 15 aa, synthetic construct
  SITE 1: note = N-term Acetic Acid
  SITE 1: note = (R)-2-allylpyrrolidine-2-carboxylic acid, useful for stapling/stapled with another amino acid residue comprising an olefin group to form a staple through the olefin group
  SITE 3: note = (S)-2-amino-4,4-dimethylpentanoic acid
  VARIANT 4: note = 2-amino-2-(pent-4-en-1-yl)hept-6-enoic acid, useful for stapling/stapled with another amino acid residue comprising an olefin group to form a staple through one of the two olefin groups and/or with another amino acid residue comprising an olefin group to form a staple through the other of the two olefin groups
  SITE 6: note = (S)-3-(2-amino-2-carboxyethyl)benzoic acid
  SITE 7: note = 2-amino-2-methylpropanoic acid
  SITE 10: note = L-homocysteine, sulfur bonded to position 1 of butane, useful for stapling/stapled with another thiol through position 4 of butane
  SITE 11: note (S)-3-amino-1-((pent-4-en-1-yloxy)carbonyl)pyrrolidine-3-ca rboxylic acid, useful for stapling/stapled with another amino acid residue comprising an olefin group to form a staple through the olefin group
  SITE 12: note = (S)-2-amino-3-(thiophen-3-yl)propanoic acid
  SITE 13: note = (S)-2-amino-3-(benzo[b]thiophen-3-yl)propanoic acid
  SITE 15: note = C-term amino
XDXXDXXAFCXXXCA

SEQ ID NO: 930 - protein, 15 aa, synthetic construct
  SITE 1: note = N-term Acetic Acid
  SITE 1: note = (R)-2-allylpyrrolidine-2-carboxylic acid, useful for stapling/stapled with another amino acid residue comprising an olefin group to form a staple through the olefin group
  SITE 3: note = (S)-2-amino-4,4-dimethylpentanoic acid
  VARIANT 4: note = 2-amino-2-(pent-4-en-1-yl)hept-6-enoic acid, useful for stapling/stapled with another amino acid residue comprising an olefin group to form a staple through one of the two olefin groups and/or with another amino acid residue comprising an olefin group to form a staple through the other of the two olefin groups
  SITE 6: note = (S)-3-(2-amino-2-carboxyethyl)benzoic acid
  SITE 7: note = 2-amino-2-methylpropanoic acid
  SITE 10: note = L-homocysteine, sulfur bonded to position 1 of but-2-ene, useful for stapling/stapled with another thiol through position 4 of but-2-ene
  SITE 11: note (S)-3-amino-1-((pent-4-en-1-yloxy)carbonyl)pyrrolidine-3-ca rboxylic acid, useful for stapling/stapled with another amino acid residue comprising an olefin group to form a staple through the olefin group
  SITE 12: note = (S)-2-amino-3-(thiophen-3-yl)propanoic acid
  SITE 13: note = (S)-2-amino-3-(benzo[b]thiophen-3-yl)propanoic acid
  SITE 15: note = C-term amino
XDXXDXXAFCXXXCA

SEQ ID NO: 931 - protein, 15 aa, synthetic construct
  SITE 1: note = N-term Acetic Acid
  SITE 1: note = (R)-2-allylpyrrolidine-2-carboxylic acid, useful for stapling/stapled with another amino acid residue comprising an olefin group to form a staple through the olefin group
  SITE 3: note = (S)-2-amino-4,4-dimethylpentanoic acid
  VARIANT 4: note = 2-amino-2-(pent-4-en-1-yl)hept-6-enoic acid, useful for stapling/stapled with another amino acid residue comprising an olefin group to form a staple through one of the two olefin groups and/or with another amino acid residue comprising an olefin group to form a staple through the other of the two olefin groups
  SITE 6: note = (S)-3-(2-amino-2-carboxyethyl)benzoic acid
  SITE 7: note = 2-amino-2-methylpropanoic acid
  SITE 10: note = Cysteine, sulfur bonded to position 1 of propan-2-one, useful for stapling/stapled with another thiol through position 3 of propan-2-one
  SITE 11: note (S)-3-amino-1-((pent-4-en-1-yloxy)carbonyl)pyrrolidine-3-ca rboxylic acid, useful for stapling/stapled with another amino acid residue comprising an olefin group to form a staple through the olefin group
  SITE 12: note = (S)-2-amino-3-(thiophen-3-yl)propanoic acid
  SITE 13: note = (S)-2-amino-3-(benzo[b]thiophen-3-yl)propanoic acid
  SITE 15: note = C-term amino
XDXXDXXAFCXXXCA

SEQ ID NO: 932 - protein, 15 aa, synthetic construct
  SITE 1: note = N-term Acetic Acid
  SITE 1: note = (R)-2-allylpyrrolidine-2-carboxylic acid, useful for stapling/stapled with another amino acid residue comprising an olefin group to form a staple through the olefin group
  SITE 3: note = (S)-2-amino-4,4-dimethylpentanoic acid
  VARIANT 4: note = 2-amino-2-(pent-4-en-1-yl)hept-6-enoic acid, useful for stapling/stapled with another amino acid residue comprising an olefin group to form a staple through one of the two olefin groups and/or with another amino acid residue comprising an olefin group to form a staple through the other of the two olefin groups
  SITE 6: note = (S)-3-(2-amino-2-carboxyethyl)benzoic acid
  SITE 7: note = 2-amino-2-methylpropanoic acid
  SITE 10: note = L-homocysteine, sulfur bonded to position 1 of propan-2-one, useful for stapling/stapled with another thiol through position 3 of propan-2-one
  SITE 11: note (S)-3-amino-1-((pent-4-en-1-yloxy)carbonyl)pyrrolidine-3-ca rboxylic acid, useful for stapling/stapled with another amino acid residue comprising an olefin group to form a staple through the olefin group
  SITE 12: note = (S)-2-amino-3-(thiophen-3-yl)propanoic acid
  SITE 13: note = (S)-2-amino-3-(benzo[b]thiophen-3-yl)propanoic acid
  SITE 15: note = C-term amino
XDXXDXXAFCXXXCA

SEQ ID NO: 933 - protein, 18 aa, synthetic construct
  SITE 1: note = N-term Acetic Acid
  SITE 3: note = (S)-2-amino-2-methylhept-6-enoic acid, useful for stapling/stapled with another amino acid residue comprising an olefin group to form a staple through the olefin group
  SITE 6: note = (S)-2-amino-4,4-dimethylpentanoic acid
  VARIANT 7: note = 2-amino-2-(pent-4-en-1-yl)hept-6-enoic acid, useful for stapling/stapled with another amino acid residue comprising an olefin group to form a staple through one of the two olefin groups and/or with another amino acid residue comprising an olefin group to form a staple through the other of the two olefin groups
  SITE 9: note = (S)-3-(2-amino-2-carboxyethyl)benzoic acid
  SITE 10: note = 2-amino-2-methylpropanoic acid
  SITE 13: note = L-lysine, useful for stapling/stapled with another amino acid residue comprising a side chain acid group to form a staple through the 6-amino group
  SITE 14: note (S)-3-amino-1-((pent-4-en-1-yloxy)carbonyl)pyrrolidine-3-ca rboxylic acid, useful for stapling/stapled with another amino acid residue comprising an olefin group to form a staple through the olefin group
  SITE 15: note = (S)-2-amino-3-(thiophen-3-yl)propanoic acid
  SITE 16: note = (S)-2-amino-3-(benzo[b]thiophen-3-yl)propanoic acid
  SITE 17: note = L-glutamic acid, useful for stapling/stapled with another amino acid residue comprising a side chain amino group to form a staple through the 4-carboxyl group
AAXADXXDXXAFKXXXEA

SEQ ID NO: 934 - protein, 18 aa, synthetic construct
  SITE 1: note = N-term Acetic Acid
  SITE 3: note = (S)-2-amino-2-methylhept-6-enoic acid, useful for stapling/stapled with another amino acid residue comprising an olefin group to form a staple through the olefin group
  SITE 6: note = (S)-2-amino-4,4-dimethylpentanoic acid
  VARIANT 7: note = 2-amino-2-(pent-4-en-1-yl)hept-6-enoic acid, useful for stapling/stapled with another amino acid residue comprising an olefin group to form a staple through one of the two olefin groups and/or with another amino acid residue comprising an olefin group to form a staple through the other of the two olefin groups
  SITE 9: note = (S)-3-(2-amino-2-carboxyethyl)benzoic acid
  SITE 10: note = 2-amino-2-methylpropanoic acid
  SITE 13: note = L-lysine, useful for stapling/stapled with another amino acid residue comprising a side chain acid group to form a staple through the 6-amino group
  SITE 14: note (S)-3-amino-1-((pent-4-en-1-yloxy)carbonyl)pyrrolidine-3-ca rboxylic acid, useful for stapling/stapled with another amino acid residue comprising an olefin group to form a staple through the olefin group
  SITE 15: note = (S)-2-amino-3-(thiophen-3-yl)propanoic acid
  SITE 16: note = (S)-2-amino-3-(benzo[b]thiophen-3-yl)propanoic acid
  SITE 17: note = L-glutamic acid, useful for stapling/stapled with another amino acid residue comprising a side chain amino group to form a staple through the 4-carboxyl group
DAXADXXDXXAFKXXXEA

SEQ ID NO: 935 - protein, 18 aa, synthetic construct
  SITE 1: note = N-term Acetic Acid
  SITE 3: note = (S)-2-amino-2-methylhept-6-enoic acid, useful for stapling/stapled with another amino acid residue comprising an olefin group to form a staple through the olefin group
  SITE 6: note = (S)-2-amino-4,4-dimethylpentanoic acid
  VARIANT 7: note = 2-amino-2-(pent-4-en-1-yl)hept-6-enoic acid, useful for stapling/stapled with another amino acid residue comprising an olefin group to form a staple through one of the two olefin groups and/or with another amino acid residue comprising an olefin group to form a staple through the other of the two olefin groups
  SITE 9: note = (S)-3-(2-amino-2-carboxyethyl)benzoic acid
  SITE 10: note = 2-amino-2-methylpropanoic acid
  SITE 13: note = L-lysine, useful for stapling/stapled with another amino acid residue comprising a side chain acid group to form a staple through the 6-amino group
  SITE 14: note (S)-3-amino-1-((pent-4-en-1-yloxy)carbonyl)pyrrolidine-3-ca rboxylic acid, useful for stapling/stapled with another amino acid residue comprising an olefin group to form a staple through the olefin group
  SITE 15: note = (S)-2-amino-3-(thiophen-3-yl)propanoic acid
  SITE 16: note = (S)-2-amino-3-(benzo[b]thiophen-3-yl)propanoic acid
  SITE 17: note = L-glutamic acid, useful for stapling/stapled with another amino acid residue comprising a side chain amino group to form a staple through the 4-carboxyl group
PAXADXXDXXAFKXXXEA

SEQ ID NO: 936 - protein, 18 aa, synthetic construct
  SITE 1: note = N-term Acetic Acid
  SITE 3: note = (S)-2-amino-2-methylhept-6-enoic acid, useful for stapling/stapled with another amino acid residue comprising an olefin group to form a staple through the olefin group
  SITE 6: note = (S)-2-amino-4,4-dimethylpentanoic acid
  VARIANT 7: note = 2-amino-2-(pent-4-en-1-yl)hept-6-enoic acid, useful for stapling/stapled with another amino acid residue comprising an olefin group to form a staple through one of the two olefin groups and/or with another amino acid residue comprising an olefin group to form a staple through the other of the two olefin groups
  SITE 9: note = (S)-3-(2-amino-2-carboxyethyl)benzoic acid
  SITE 10: note = 2-amino-2-methylpropanoic acid
  SITE 13: note = L-lysine, useful for stapling/stapled with another amino acid residue comprising a side chain acid group to form a staple through the 6-amino group
  SITE 14: note (S)-3-amino-1-((pent-4-en-1-yloxy)carbonyl)pyrrolidine-3-ca rboxylic acid, useful for stapling/stapled with another amino acid residue comprising an olefin group to form a staple through the olefin group
  SITE 15: note = (S)-2-amino-3-(thiophen-3-yl)propanoic acid
  SITE 16: note = (S)-2-amino-3-(benzo[b]thiophen-3-yl)propanoic acid
  SITE 17: note = L-glutamic acid, useful for stapling/stapled with another amino acid residue comprising a side chain amino group to form a staple through the 4-carboxyl group
AAXSDXXDXXAFKXXXEA

SEQ ID NO: 937 - protein, 18 aa, synthetic construct
  SITE 1: note = N-term Acetic Acid
  SITE 3: note = (S)-2-amino-2-methylhept-6-enoic acid, useful for stapling/stapled with another amino acid residue comprising an olefin group to form a staple through the olefin group
  SITE 6: note = (S)-2-amino-4,4-dimethylpentanoic acid
  VARIANT 7: note = 2-amino-2-(pent-4-en-1-yl)hept-6-enoic acid, useful for stapling/stapled with another amino acid residue comprising an olefin group to form a staple through one of the two olefin groups and/or with another amino acid residue comprising an olefin group to form a staple through the other of the two olefin groups
  SITE 9: note = (S)-3-(2-amino-2-carboxyethyl)benzoic acid
  SITE 10: note = 2-amino-2-methylpropanoic acid
  SITE 13: note = L-lysine, useful for stapling/stapled with another amino acid residue comprising a side chain acid group to form a staple through the 6-amino group
  SITE 14: note (S)-3-amino-1-((pent-4-en-1-yloxy)carbonyl)pyrrolidine-3-ca rboxylic acid, useful for stapling/stapled with another amino acid residue comprising an olefin group to form a staple through the olefin group
  SITE 15: note = (S)-2-amino-3-(thiophen-3-yl)propanoic acid
  SITE 16: note = (S)-2-amino-3-(benzo[b]thiophen-3-yl)propanoic acid
  SITE 17: note = L-glutamic acid, useful for stapling/stapled with another amino acid residue comprising a side chain amino group to form a staple through the 4-carboxyl group
DAXSDXXDXXAFKXXXEA

SEQ ID NO: 938 - protein, 18 aa, synthetic construct
  SITE 1: note = N-term Acetic Acid
  SITE 3: note = (S)-2-amino-2-methylhept-6-enoic acid, useful for stapling/stapled with another amino acid residue comprising an olefin group to form a staple through the olefin group
  SITE 6: note = (S)-2-amino-4,4-dimethylpentanoic acid
  VARIANT 7: note = 2-amino-2-(pent-4-en-1-yl)hept-6-enoic acid, useful for stapling/stapled with another amino acid residue comprising an olefin group to form a staple through one of the two olefin groups and/or with another amino acid residue comprising an olefin group to form a staple through the other of the two olefin groups
  SITE 9: note = (S)-3-(2-amino-2-carboxyethyl)benzoic acid
  SITE 10: note = 2-amino-2-methylpropanoic acid
  SITE 13: note = L-lysine, useful for stapling/stapled with another amino acid residue comprising a side chain acid group to form a staple through the 6-amino group
  SITE 14: note (S)-3-amino-1-((pent-4-en-1-yloxy)carbonyl)pyrrolidine-3-ca rboxylic acid, useful for stapling/stapled with another amino acid residue comprising an olefin group to form a staple through the olefin group
  SITE 15: note = (S)-2-amino-3-(thiophen-3-yl)propanoic acid
  SITE 16: note = (S)-2-amino-3-(benzo[b]thiophen-3-yl)propanoic acid
  SITE 17: note = L-glutamic acid, useful for stapling/stapled with another amino acid residue comprising a side chain amino group to form a staple through the 4-carboxyl group
PAXSDXXDXXAFKXXXEA

SEQ ID NO: 939 - protein, 18 aa, synthetic construct
  SITE 1: note = N-term Acetic Acid
  SITE 3: note = (S)-2-amino-2-methylhept-6-enoic acid, useful for stapling/stapled with another amino acid residue comprising an olefin group to form a staple through the olefin group
  SITE 6: note = (S)-2-amino-4,4-dimethylpentanoic acid
  VARIANT 7: note = 2-amino-2-(pent-4-en-1-yl)hept-6-enoic acid, useful for stapling/stapled with another amino acid residue comprising an olefin group to form a staple through one of the two olefin groups and/or with another amino acid residue comprising an olefin group to form a staple through the other of the two olefin groups
  SITE 9: note = (S)-3-(2-amino-2-carboxyethyl)benzoic acid
  SITE 10: note = 2-amino-2-methylpropanoic acid
  SITE 13: note = L-lysine, useful for stapling/stapled with another amino acid residue comprising a side chain acid group to form a staple through the 6-amino group
  SITE 14: note (S)-3-amino-1-((pent-4-en-1-yloxy)carbonyl)pyrrolidine-3-ca rboxylic acid, useful for stapling/stapled with another amino acid residue comprising an olefin group to form a staple through the olefin group
  SITE 15: note = (S)-2-amino-3-(thiophen-3-yl)propanoic acid
  SITE 16: note = (S)-2-amino-3-(benzo[b]thiophen-3-yl)propanoic acid
  SITE 17: note = L-glutamic acid, useful for stapling/stapled with another amino acid residue comprising a side chain amino group to form a staple through the 4-carboxyl group
AAXLDXXDXXAFKXXXEA

SEQ ID NO: 940 - protein, 18 aa, synthetic construct
  SITE 1: note = N-term Acetic Acid
  SITE 3: note = (S)-2-amino-2-methylhept-6-enoic acid, useful for stapling/stapled with another amino acid residue comprising an olefin group to form a staple through the olefin group
  SITE 6: note = (S)-2-amino-4,4-dimethylpentanoic acid
  VARIANT 7: note = 2-amino-2-(pent-4-en-1-yl)hept-6-enoic acid, useful for stapling/stapled with another amino acid residue comprising an olefin group to form a staple through one of the two olefin groups and/or with another amino acid residue comprising an olefin group to form a staple through the other of the two olefin groups
  SITE 9: note = (S)-3-(2-amino-2-carboxyethyl)benzoic acid
  SITE 10: note = 2-amino-2-methylpropanoic acid
  SITE 13: note = L-lysine, useful for stapling/stapled with another amino acid residue comprising a side chain acid group to form a staple through the 6-amino group
  SITE 14: note (S)-3-amino-1-((pent-4-en-1-yloxy)carbonyl)pyrrolidine-3-ca rboxylic acid, useful for stapling/stapled with another amino acid residue comprising an olefin group to form a staple through the olefin group
  SITE 15: note = (S)-2-amino-3-(thiophen-3-yl)propanoic acid
  SITE 16: note = (S)-2-amino-3-(benzo[b]thiophen-3-yl)propanoic acid
  SITE 17: note = L-glutamic acid, useful for stapling/stapled with another amino acid residue comprising a side chain amino group to form a staple through the 4-carboxyl group
DAXLDXXDXXAFKXXXEA

SEQ ID NO: 941 - protein, 18 aa, synthetic construct
  SITE 1: note = N-term Acetic Acid
  SITE 3: note = (S)-2-amino-2-methylhept-6-enoic acid, useful for stapling/stapled with another amino acid residue comprising an olefin group to form a staple through the olefin group
  SITE 6: note = (S)-2-amino-4,4-dimethylpentanoic acid
  VARIANT 7: note = 2-amino-2-(pent-4-en-1-yl)hept-6-enoic acid, useful for stapling/stapled with another amino acid residue comprising an olefin group to form a staple through one of the two olefin groups and/or with another amino acid residue comprising an olefin group to form a staple through the other of the two olefin groups
  SITE 9: note = (S)-3-(2-amino-2-carboxyethyl)benzoic acid
  SITE 10: note = 2-amino-2-methylpropanoic acid
  SITE 13: note = L-lysine, useful for stapling/stapled with another amino acid residue comprising a side chain acid group to form a staple through the 6-amino group
  SITE 14: note (S)-3-amino-1-((pent-4-en-1-yloxy)carbonyl)pyrrolidine-3-ca rboxylic acid, useful for stapling/stapled with another amino acid residue comprising an olefin group to form a staple through the olefin group
  SITE 15: note = (S)-2-amino-3-(thiophen-3-yl)propanoic acid
  SITE 16: note = (S)-2-amino-3-(benzo[b]thiophen-3-yl)propanoic acid
  SITE 17: note = L-glutamic acid, useful for stapling/stapled with another amino acid residue comprising a side chain amino group to form a staple through the 4-carboxyl group
PAXLDXXDXXAFKXXXEA

SEQ ID NO: 942 - protein, 18 aa, synthetic construct
  SITE 1: note = N-term Acetic Acid
  SITE 3: note = (S)-2-amino-2-methylhept-6-enoic acid, useful for stapling/stapled with another amino acid residue comprising an olefin group to form a staple through the olefin group
  SITE 6: note = (S)-2-amino-4,4-dimethylpentanoic acid
  VARIANT 7: note = 2-amino-2-(pent-4-en-1-yl)hept-6-enoic acid, useful for stapling/stapled with another amino acid residue comprising an olefin group to form a staple through one of the two olefin groups and/or with another amino acid residue comprising an olefin group to form a staple through the other of the two olefin groups
  SITE 9: note = (S)-3-(2-amino-2-carboxyethyl)benzoic acid
  SITE 10: note = 2-amino-2-methylpropanoic acid
  SITE 13: note = L-lysine, useful for stapling/stapled with another amino acid residue comprising a side chain acid group to form a staple through the 6-amino group
  SITE 14: note (S)-3-amino-1-((pent-4-en-1-yloxy)carbonyl)pyrrolidine-3-ca rboxylic acid, useful for stapling/stapled with another amino acid residue comprising an olefin group to form a staple through the olefin group
  SITE 15: note = (S)-2-amino-3-(thiophen-3-yl)propanoic acid
  SITE 16: note = (S)-2-amino-3-(benzo[b]thiophen-3-yl)propanoic acid
  SITE 17: note = L-glutamic acid, useful for stapling/stapled with another amino acid residue comprising a side chain amino group to form a staple through the 4-carboxyl group
ASXADXXDXXAFKXXXEA

SEQ ID NO: 943 - protein, 18 aa, synthetic construct
  SITE 1: note = N-term Acetic Acid
  SITE 3: note = (S)-2-amino-2-methylhept-6-enoic acid, useful for stapling/stapled with another amino acid residue comprising an olefin group to form a staple through the olefin group
  SITE 6: note = (S)-2-amino-4,4-dimethylpentanoic acid
  VARIANT 7: note = 2-amino-2-(pent-4-en-1-yl)hept-6-enoic acid, useful for stapling/stapled with another amino acid residue comprising an olefin group to form a staple through one of the two olefin groups and/or with another amino acid residue comprising an olefin group to form a staple through the other of the two olefin groups
  SITE 9: note = (S)-3-(2-amino-2-carboxyethyl)benzoic acid
  SITE 10: note = 2-amino-2-methylpropanoic acid
  SITE 13: note = L-lysine, useful for stapling/stapled with another amino acid residue comprising a side chain acid group to form a staple through the 6-amino group
  SITE 14: note (S)-3-amino-1-((pent-4-en-1-yloxy)carbonyl)pyrrolidine-3-ca rboxylic acid, useful for stapling/stapled with another amino acid residue comprising an olefin group to form a staple through the olefin group
  SITE 15: note = (S)-2-amino-3-(thiophen-3-yl)propanoic acid
  SITE 16: note = (S)-2-amino-3-(benzo[b]thiophen-3-yl)propanoic acid
  SITE 17: note = L-glutamic acid, useful for stapling/stapled with another amino acid residue comprising a side chain amino group to form a staple through the 4-carboxyl group
DSXADXXDXXAFKXXXEA

SEQ ID NO: 944 - protein, 18 aa, synthetic construct
  SITE 1: note = N-term Acetic Acid
  SITE 3: note = (S)-2-amino-2-methylhept-6-enoic acid, useful for stapling/stapled with another amino acid residue comprising an olefin group to form a staple through the olefin group
  SITE 6: note = (S)-2-amino-4,4-dimethylpentanoic acid
  VARIANT 7: note = 2-amino-2-(pent-4-en-1-yl)hept-6-enoic acid, useful for stapling/stapled with another amino acid residue comprising an olefin group to form a staple through one of the two olefin groups and/or with another amino acid residue comprising an olefin group to form a staple through the other of the two olefin groups
  SITE 9: note = (S)-3-(2-amino-2-carboxyethyl)benzoic acid
  SITE 10: note = 2-amino-2-methylpropanoic acid
  SITE 13: note = L-lysine, useful for stapling/stapled with another amino acid residue comprising a side chain acid group to form a staple through the 6-amino group
  SITE 14: note (S)-3-amino-1-((pent-4-en-1-yloxy)carbonyl)pyrrolidine-3-ca rboxylic acid, useful for stapling/stapled with another amino acid residue comprising an olefin group to form a staple through the olefin group
  SITE 15: note = (S)-2-amino-3-(thiophen-3-yl)propanoic acid
  SITE 16: note = (S)-2-amino-3-(benzo[b]thiophen-3-yl)propanoic acid
  SITE 17: note = L-glutamic acid, useful for stapling/stapled with another amino acid residue comprising a side chain amino group to form a staple through the 4-carboxyl group
PSXADXXDXXAFKXXXEA

SEQ ID NO: 945 - protein, 15 aa, synthetic construct
  SITE 1: note = N-term Acetic Acid
  SITE 1: note = (S)-2-amino-2-methylhept-6-enoic acid, useful for stapling/stapled with another amino acid residue comprising an olefin group to form a staple through the olefin group
  VARIANT 5: note = 2-amino-2-(pent-4-en-1-yl)hept-6-enoic acid, useful for stapling/stapled with another amino acid residue comprising an olefin group to form a staple through one of the two olefin groups and/or with another amino acid residue comprising an olefin group to form a staple through the other of the two olefin groups
  SITE 7: note = (S)-3-(2-amino-2-carboxyethyl)benzoic acid
  SITE 8: note = 2-amino-2-methylpropanoic acid
  SITE 11: note = L-lysine, useful for stapling/stapled with another amino acid residue comprising a side chain acid group to form a staple through the 6-amino group
  SITE 12: note (S)-3-amino-1-((pent-4-en-1-yloxy)carbonyl)pyrrolidine-3-ca rboxylic acid, useful for stapling/stapled with another amino acid residue comprising an olefin group to form a staple through the olefin group
  SITE 14: note = (S)-2-amino-3-(3,4-dichlorophenyl)propanoic acid
  SITE 15: note = L-glutamic acid, useful for stapling/stapled with another amino acid residue comprising a side chain amino group to form a staple through the 4-carboxyl group
  SITE 15: note = C-term amino
XLDIXDXXAFKXFXE

SEQ ID NO: 946 - protein, 17 aa, synthetic construct
  SITE 1: note = N-term Acetic Acid
  SITE 1: note = (S)-2-amino-2-methylhept-6-enoic acid, useful for stapling/stapled with another amino acid residue comprising an olefin group to form a staple through the olefin group
  SITE 4: note = (S)-2-amino-4,4-dimethylpentanoic acid
  VARIANT 5: note = 2-amino-2-(pent-4-en-1-yl)hept-6-enoic acid, useful for stapling/stapled with another amino acid residue comprising an olefin group to form a staple through one of the two olefin groups and/or with another amino acid residue comprising an olefin group to form a staple through the other of the two olefin groups
  SITE 8: note = (S)-3-(2-amino-2-carboxyethyl)benzoic acid
  SITE 9: note = 2-amino-2-methylpropanoic acid
  SITE 12: note (S)-2-amino-3-(4-amino-N-(hept-6-en-1-yl)butanamido)propano ic acid, useful for stapling/stapled with another amino acid residue comprising an olefin group to form a staple through the olefin group and useful for stapling/stapled with another amino acid residue comprising a side chain acid group to form a staple through the amino group in the side chain
  SITE 14: note = (S)-2-amino-3-(thiophen-3-yl)propanoic acid
  SITE 15: note = (S)-2-amino-3-(benzo[b]thiophen-3-yl)propanoic acid
  SITE 16: note = L-glutamic acid, useful for stapling/stapled with another amino acid residue comprising a side chain amino group to form a staple through the 4-carboxyl group
  SITE 17: note = C-term amino
XADXXADXXAFXLXXEA

SEQ ID NO: 947 - protein, 17 aa, synthetic construct
  SITE 1: note = N-term Acetic Acid
  SITE 1: note = (S)-2-amino-2-methyloct-7-enoic acid, useful for stapling/stapled with another amino acid residue comprising an olefin group to form a staple through the olefin group
  SITE 4: note = (S)-2-amino-4,4-dimethylpentanoic acid
  VARIANT 5: note = 2-amino-2-(pent-4-en-1-yl)hept-6-enoic acid, useful for stapling/stapled with another amino acid residue comprising an olefin group to form a staple through one of the two olefin groups and/or with another amino acid residue comprising an olefin group to form a staple through the other of the two olefin groups
  SITE 8: note = (S)-3-(2-amino-2-carboxyethyl)benzoic acid
  SITE 9: note = 2-amino-2-methylpropanoic acid
  SITE 12: note (S)-2-amino-3-(4-amino-N-(hept-6-en-1-yl)butanamido)propano ic acid, useful for stapling/stapled with another amino acid residue comprising an olefin group to form a staple through the olefin group and useful for stapling/stapled with another amino acid residue comprising a side chain acid group to form a staple through the amino group in the side chain
  SITE 14: note = (S)-2-amino-3-(thiophen-3-yl)propanoic acid
  SITE 15: note = (S)-2-amino-3-(benzo[b]thiophen-3-yl)propanoic acid
  SITE 16: note = L-glutamic acid, useful for stapling/stapled with another amino acid residue comprising a side chain amino group to form a staple through the 4-carboxyl group
  SITE 17: note = C-term amino
XADXXADXXAFXLXXEA

SEQ ID NO: 948 - protein, 16 aa, synthetic construct
  SITE 1: note = N-term Acetic Acid
  SITE 1: note = (S)-2-amino-2-methylhept-6-enoic acid, useful for stapling/stapled with another amino acid residue comprising an olefin group to form a staple through the olefin group
  SITE 4: note = (S)-2-amino-4,4-dimethylpentanoic acid
  VARIANT 5: note = 2-amino-2-(pent-4-en-1-yl)hept-6-enoic acid, useful for stapling/stapled with another amino acid residue comprising an olefin group to form a staple through one of the two olefin groups and/or with another amino acid residue comprising an olefin group to form a staple through the other of the two olefin groups
  SITE 7: note = (S)-3-(2-amino-2-carboxyethyl)benzoic acid
  SITE 8: note = 2-amino-2-methylpropanoic acid
  SITE 12: note (S)-2-amino-3-(4-amino-N-(hept-6-en-1-yl)butanamido)propano ic acid, useful for stapling/stapled with another amino acid residue comprising an olefin group to form a staple through the olefin group and useful for stapling/stapled with another amino acid residue comprising a side chain acid group to form a staple through the amino group in the side chain
  SITE 13: note = (S)-2-amino-3-(thiophen-3-yl)propanoic acid
  SITE 14: note = (S)-2-amino-3-(benzo[b]thiophen-3-yl)propanoic acid
  SITE 16: note = L-glutamic acid, useful for stapling/stapled with another amino acid residue comprising a side chain amino group to form a staple through the 4-carboxyl group
  SITE 16: note = C-term amino
XADXXDXXAFLXXXAE

SEQ ID NO: 949 - protein, 16 aa, synthetic construct
  SITE 1: note = N-term Acetic Acid
  SITE 1: note = (S)-2-amino-2-methyloct-7-enoic acid, useful for stapling/stapled with another amino acid residue comprising an olefin group to form a staple through the olefin group
  SITE 4: note = (S)-2-amino-4,4-dimethylpentanoic acid
  VARIANT 5: note = 2-amino-2-(pent-4-en-1-yl)hept-6-enoic acid, useful for stapling/stapled with another amino acid residue comprising an olefin group to form a staple through one of the two olefin groups and/or with another amino acid residue comprising an olefin group to form a staple through the other of the two olefin groups
  SITE 7: note = (S)-3-(2-amino-2-carboxyethyl)benzoic acid
  SITE 8: note = 2-amino-2-methylpropanoic acid
  SITE 12: note (S)-2-amino-3-(4-amino-N-(hept-6-en-1-yl)butanamido)propano ic acid, useful for stapling/stapled with another amino acid residue comprising an olefin group to form a staple through the olefin group and useful for stapling/stapled with another amino acid residue comprising a side chain acid group to form a staple through the amino group in the side chain
  SITE 13: note = (S)-2-amino-3-(thiophen-3-yl)propanoic acid
  SITE 14: note = (S)-2-amino-3-(benzo[b]thiophen-3-yl)propanoic acid
  SITE 16: note = L-glutamic acid, useful for stapling/stapled with another amino acid residue comprising a side chain amino group to form a staple through the 4-carboxyl group
  SITE 16: note = C-term amino
XADXXDXXAFLXXXAE

SEQ ID NO: 950 - protein, 15 aa, synthetic construct
  SITE 1: note = N-term Acetic Acid
  SITE 1: note = (R)-2-allylpyrrolidine-2-carboxylic acid, useful for stapling/stapled with another amino acid residue comprising an olefin group to form a staple through the olefin group
  SITE 2: note = (S)-2-amino-4-mercapto-4-oxobutanoic acid
  SITE 3: note = (S)-2-amino-4,4-dimethylpentanoic acid
  VARIANT 4: note = 2-amino-2-(pent-4-en-1-yl)hept-6-enoic acid, useful for stapling/stapled with another amino acid residue comprising an olefin group to form a staple through one of the two olefin groups and/or with another amino acid residue comprising an olefin group to form a staple through the other of the two olefin groups
  SITE 6: note = (S)-3-(2-amino-2-carboxyethyl)benzoic acid
  SITE 7: note = 2-amino-2-methylpropanoic acid
  SITE 10: note = L-lysine, useful for stapling/stapled with another amino acid residue comprising a side chain acid group to form a staple through the 6-amino group
  SITE 11: note (S)-3-amino-1-((pent-4-en-1-yloxy)carbonyl)pyrrolidine-3-ca rboxylic acid, useful for stapling/stapled with another amino acid residue comprising an olefin group to form a staple through the olefin group
  SITE 12: note = (S)-2-amino-3-(thiophen-3-yl)propanoic acid
  SITE 13: note = (S)-2-amino-3-(benzo[b]thiophen-3-yl)propanoic acid
  SITE 14: note = L-glutamic acid, useful for stapling/stapled with another amino acid residue comprising a side chain amino group to form a staple through the 4-carboxyl group
  SITE 15: note = C-term amino
XXXXDXXAFKXXXEA

SEQ ID NO: 951 - protein, 15 aa, synthetic construct
  SITE 1: note = N-term Acetic Acid
  SITE 1: note = (R)-2-allylpyrrolidine-2-carboxylic acid, useful for stapling/stapled with another amino acid residue comprising an olefin group to form a staple through the olefin group
  SITE 3: note = (S)-2-amino-4,4-dimethylpentanoic acid
  VARIANT 4: note = 2-amino-2-(pent-4-en-1-yl)hept-6-enoic acid, useful for stapling/stapled with another amino acid residue comprising an olefin group to form a staple through one of the two olefin groups and/or with another amino acid residue comprising an olefin group to form a staple through the other of the two olefin groups
  SITE 5: note = (S)-2-amino-4-mercapto-4-oxobutanoic acid
  SITE 6: note = (S)-3-(2-amino-2-carboxyethyl)benzoic acid
  SITE 7: note = 2-amino-2-methylpropanoic acid
  SITE 10: note = L-lysine, useful for stapling/stapled with another amino acid residue comprising a side chain acid group to form a staple through the 6-amino group
  SITE 11: note (S)-3-amino-1-((pent-4-en-1-yloxy)carbonyl)pyrrolidine-3-ca rboxylic acid, useful for stapling/stapled with another amino acid residue comprising an olefin group to form a staple through the olefin group
  SITE 12: note = (S)-2-amino-3-(thiophen-3-yl)propanoic acid
  SITE 13: note = (S)-2-amino-3-(benzo[b]thiophen-3-yl)propanoic acid
  SITE 14: note = L-glutamic acid, useful for stapling/stapled with another amino acid residue comprising a side chain amino group to form a staple through the 4-carboxyl group
  SITE 15: note = C-term amino
XDXXXXXAFKXXXEA

SEQ ID NO: 952 - protein, 15 aa, synthetic construct
  SITE 1: note = N-term Acetic Acid
  SITE 1: note = (R)-2-allylpyrrolidine-2-carboxylic acid, useful for stapling/stapled with another amino acid residue comprising an olefin group to form a staple through the olefin group
  SITE 2: note = (S)-2-amino-4-mercapto-4-oxobutanoic acid
  SITE 3: note = (S)-2-amino-4,4-dimethylpentanoic acid
  VARIANT 4: note = 2-amino-2-(pent-4-en-1-yl)hept-6-enoic acid, useful for stapling/stapled with another amino acid residue comprising an olefin group to form a staple through one of the two olefin groups and/or with another amino acid residue comprising an olefin group to form a staple through the other of the two olefin groups
  SITE 5: note = (S)-2-amino-4-mercapto-4-oxobutanoic acid
  SITE 6: note = (S)-3-(2-amino-2-carboxyethyl)benzoic acid
  SITE 7: note = 2-amino-2-methylpropanoic acid
  SITE 10: note = L-lysine, useful for stapling/stapled with another amino acid residue comprising a side chain acid group to form a staple through the 6-amino group
  SITE 11: note (S)-3-amino-1-((pent-4-en-1-yloxy)carbonyl)pyrrolidine-3-ca rboxylic acid, useful for stapling/stapled with another amino acid residue comprising an olefin group to form a staple through the olefin group
  SITE 12: note = (S)-2-amino-3-(thiophen-3-yl)propanoic acid
  SITE 13: note = (S)-2-amino-3-(benzo[b]thiophen-3-yl)propanoic acid
  SITE 14: note = L-glutamic acid, useful for stapling/stapled with another amino acid residue comprising a side chain amino group to form a staple through the 4-carboxyl group
  SITE 15: note = C-term amino
XXXXXXXAFKXXXEA

SEQ ID NO: 953 - protein, 15 aa, synthetic construct
  SITE 1: note = N-term Acetic Acid
  SITE 1: note = (R)-2-allylpyrrolidine-2-carboxylic acid, useful for stapling/stapled with another amino acid residue comprising an olefin group to form a staple through the olefin group
  SITE 3: note = (S)-2-amino-4,4-dimethylpentanoic acid
  VARIANT 4: note = 2-amino-2-(pent-4-en-1-yl)hept-6-enoic acid, useful for stapling/stapled with another amino acid residue comprising an olefin group to form a staple through one of the two olefin groups and/or with another amino acid residue comprising an olefin group to form a staple through the other of the two olefin groups
  SITE 6: note = (S)-3-(2-amino-2-carboxyethyl)benzoic acid
  SITE 7: note = 2-amino-2-methylpropanoic acid
  SITE 10: note = L-lysine, useful for stapling/stapled with another amino acid residue comprising a side chain acid group to form a staple through the 6-amino group
  SITE 11: note (S)-3-amino-1-((pent-4-en-1-yloxy)carbonyl)pyrrolidine-3-ca rboxylic acid, useful for stapling/stapled with another amino acid residue comprising an olefin group to form a staple through the olefin group
  SITE 12: note = (S)-2-amino-6-methylheptanoic acid
  SITE 13: note = (S)-2-amino-3-(benzo[b]thiophen-3-yl)propanoic acid
  SITE 14: note = L-glutamic acid, useful for stapling/stapled with another amino acid residue comprising a side chain amino group to form a staple through the 4-carboxyl group
  SITE 15: note = C-term amino
XDXXDXXAFKXXXEA

SEQ ID NO: 954 - protein, 15 aa, synthetic construct
  SITE 1: note = N-term Acetic Acid
  SITE 1: note = (R)-2-allylpyrrolidine-2-carboxylic acid, useful for stapling/stapled with another amino acid residue comprising an olefin group to form a staple through the olefin group
  SITE 3: note = (S)-2-amino-4,4-dimethylpentanoic acid
  VARIANT 4: note = 2-amino-2-(pent-4-en-1-yl)hept-6-enoic acid, useful for stapling/stapled with another amino acid residue comprising an olefin group to form a staple through one of the two olefin groups and/or with another amino acid residue comprising an olefin group to form a staple through the other of the two olefin groups
  SITE 6: note = (S)-3-(2-amino-2-carboxyethyl)benzoic acid
  SITE 7: note = 2-amino-2-methylpropanoic acid
  SITE 10: note = L-lysine, useful for stapling/stapled with another amino acid residue comprising a side chain acid group to form a staple through the 6-amino group
  SITE 11: note (S)-3-amino-1-((pent-4-en-1-yloxy)carbonyl)pyrrolidine-3-ca rboxylic acid, useful for stapling/stapled with another amino acid residue comprising an olefin group to form a staple through the olefin group
  SITE 12: note = (S)-2-amino-4-phenylbutanoic acid
  SITE 13: note = (S)-2-amino-3-(benzo[b]thiophen-3-yl)propanoic acid
  SITE 14: note = L-glutamic acid, useful for stapling/stapled with another amino acid residue comprising a side chain amino group to form a staple through the 4-carboxyl group
  SITE 15: note = C-term amino
XDXXDXXAFKXXXEA

SEQ ID NO: 955 - protein, 15 aa, synthetic construct
  SITE 1: note = N-term Acetic Acid
  SITE 1: note = (R)-2-allylpyrrolidine-2-carboxylic acid, useful for stapling/stapled with another amino acid residue comprising an olefin group to form a staple through the olefin group
  SITE 3: note = (S)-2-amino-4,4-dimethylpentanoic acid
  VARIANT 4: note = 2-amino-2-(pent-4-en-1-yl)hept-6-enoic acid, useful for stapling/stapled with another amino acid residue comprising an olefin group to form a staple through one of the two olefin groups and/or with another amino acid residue comprising an olefin group to form a staple through the other of the two olefin groups
  SITE 6: note = (S)-3-(2-amino-2-carboxyethyl)benzoic acid
  SITE 7: note = 2-amino-2-methylpropanoic acid
  SITE 10: note = L-lysine, useful for stapling/stapled with another amino acid residue comprising a side chain acid group to form a staple through the 6-amino group
  SITE 11: note (S)-3-amino-1-((pent-4-en-1-yloxy)carbonyl)pyrrolidine-3-ca rboxylic acid, useful for stapling/stapled with another amino acid residue comprising an olefin group to form a staple through the olefin group
  SITE 12: note = (S)-2-amino-5-hydroxypentanoic acid
  SITE 13: note = (S)-2-amino-3-(benzo[b]thiophen-3-yl)propanoic acid
  SITE 14: note = L-glutamic acid, useful for stapling/stapled with another amino acid residue comprising a side chain amino group to form a staple through the 4-carboxyl group
  SITE 15: note = C-term amino
XDXXDXXAFKXXXEA

SEQ ID NO: 956 - protein, 15 aa, synthetic construct
  SITE 1: note = N-term Acetic Acid
  SITE 1: note = (R)-2-allylpyrrolidine-2-carboxylic acid, useful for stapling/stapled with another amino acid residue comprising an olefin group to form a staple through the olefin group
  SITE 3: note = (S)-2-amino-4,4-dimethylpentanoic acid
  VARIANT 4: note = 2-amino-2-(pent-4-en-1-yl)hept-6-enoic acid, useful for stapling/stapled with another amino acid residue comprising an olefin group to form a staple through one of the two olefin groups and/or with another amino acid residue comprising an olefin group to form a staple through the other of the two olefin groups
  SITE 6: note = (S)-3-(2-amino-2-carboxyethyl)benzoic acid
  SITE 7: note = 2-amino-2-methylpropanoic acid
  SITE 10: note = L-lysine, useful for stapling/stapled with another amino acid residue comprising a side chain acid group to form a staple through the 6-amino group
  SITE 11: note (S)-3-amino-1-((pent-4-en-1-yloxy)carbonyl)pyrrolidine-3-ca rboxylic acid, useful for stapling/stapled with another amino acid residue comprising an olefin group to form a staple through the olefin group
  SITE 12: note = (S)-2-amino-6-methylheptanoic acid
  SITE 13: note = (S)-2-amino-3-(3,4-dichlorophenyl)propanoic acid
  SITE 14: note = L-glutamic acid, useful for stapling/stapled with another amino acid residue comprising a side chain amino group to form a staple through the 4-carboxyl group
  SITE 15: note = C-term amino
XDXXDXXAFKXXXEA

SEQ ID NO: 957 - protein, 15 aa, synthetic construct
  SITE 1: note = N-term Acetic Acid
  SITE 1: note = (R)-2-allylpyrrolidine-2-carboxylic acid, useful for stapling/stapled with another amino acid residue comprising an olefin group to form a staple through the olefin group
  SITE 3: note = (S)-2-amino-4,4-dimethylpentanoic acid
  VARIANT 4: note = 2-amino-2-(pent-4-en-1-yl)hept-6-enoic acid, useful for stapling/stapled with another amino acid residue comprising an olefin group to form a staple through one of the two olefin groups and/or with another amino acid residue comprising an olefin group to form a staple through the other of the two olefin groups
  SITE 6: note = (S)-3-(2-amino-2-carboxyethyl)benzoic acid
  SITE 7: note = 2-amino-2-methylpropanoic acid
  SITE 10: note = L-lysine, useful for stapling/stapled with another amino acid residue comprising a side chain acid group to form a staple through the 6-amino group
  SITE 11: note (S)-3-amino-1-((pent-4-en-1-yloxy)carbonyl)pyrrolidine-3-ca rboxylic acid, useful for stapling/stapled with another amino acid residue comprising an olefin group to form a staple through the olefin group
  SITE 12: note = (S)-2-amino-4-phenylbutanoic acid
  SITE 13: note = (S)-2-amino-3-(3,4-dichlorophenyl)propanoic acid
  SITE 14: note = L-glutamic acid, useful for stapling/stapled with another amino acid residue comprising a side chain amino group to form a staple through the 4-carboxyl group
  SITE 15: note = C-term amino
XDXXDXXAFKXXXEA

SEQ ID NO: 958 - protein, 15 aa, synthetic construct
  SITE 1: note = N-term Acetic Acid
  SITE 1: note = (R)-2-allylpyrrolidine-2-carboxylic acid, useful for stapling/stapled with another amino acid residue comprising an olefin group to form a staple through the olefin group
  SITE 3: note = (S)-2-amino-4,4-dimethylpentanoic acid
  VARIANT 4: note = 2-amino-2-(pent-4-en-1-yl)hept-6-enoic acid, useful for stapling/stapled with another amino acid residue comprising an olefin group to form a staple through one of the two olefin groups and/or with another amino acid residue comprising an olefin group to form a staple through the other of the two olefin groups
  SITE 6: note = (S)-3-(2-amino-2-carboxyethyl)benzoic acid
  SITE 7: note = 2-amino-2-methylpropanoic acid
  SITE 10: note = L-lysine, useful for stapling/stapled with another amino acid residue comprising a side chain acid group to form a staple through the 6-amino group
  SITE 11: note (S)-3-amino-1-((pent-4-en-1-yloxy)carbonyl)pyrrolidine-3-ca rboxylic acid, useful for stapling/stapled with another amino acid residue comprising an olefin group to form a staple through the olefin group
  SITE 12: note = (S)-2-amino-5-hydroxypentanoic acid
  SITE 13: note = (S)-2-amino-3-(3,4-dichlorophenyl)propanoic acid
  SITE 14: note = L-glutamic acid, useful for stapling/stapled with another amino acid residue comprising a side chain amino group to form a staple through the 4-carboxyl group
  SITE 15: note = C-term amino
XDXXDXXAFKXXXEA

SEQ ID NO: 959 - protein, 15 aa, synthetic construct
  SITE 1: note = N-term Acetic Acid
  SITE 1: note = (R)-2-allylpyrrolidine-2-carboxylic acid, useful for stapling/stapled with another amino acid residue comprising an olefin group to form a staple through the olefin group
  VARIANT 4: note = 2-amino-2-(pent-4-en-1-yl)hept-6-enoic acid, useful for stapling/stapled with another amino acid residue comprising an olefin group to form a staple through one of the two olefin groups and/or with another amino acid residue comprising an olefin group to form a staple through the other of the two olefin groups
  SITE 6: note = (S)-3-(2-amino-2-carboxyethyl)benzoic acid
  SITE 7: note = 2-amino-2-methylpropanoic acid
  SITE 10: note = L-lysine, useful for stapling/stapled with another amino acid residue comprising a side chain acid group to form a staple through the 6-amino group
  SITE 11: note (S)-3-amino-1-((pent-4-en-1-yloxy)carbonyl)pyrrolidine-3-ca rboxylic acid, useful for stapling/stapled with another amino acid residue comprising an olefin group to form a staple through the olefin group
  SITE 12: note = (S)-2-amino-6-methylheptanoic acid
  SITE 13: note = (S)-2-amino-3-(benzo[b]thiophen-3-yl)propanoic acid
  SITE 14: note = L-glutamic acid, useful for stapling/stapled with another amino acid residue comprising a side chain amino group to form a staple through the 4-carboxyl group
  SITE 15: note = C-term amino
XDIXDXXAFKXXXEA

SEQ ID NO: 960 - protein, 15 aa, synthetic construct
  SITE 1: note = N-term Acetic Acid
  SITE 1: note = (R)-2-allylpyrrolidine-2-carboxylic acid, useful for stapling/stapled with another amino acid residue comprising an olefin group to form a staple through the olefin group
  VARIANT 4: note = 2-amino-2-(pent-4-en-1-yl)hept-6-enoic acid, useful for stapling/stapled with another amino acid residue comprising an olefin group to form a staple through one of the two olefin groups and/or with another amino acid residue comprising an olefin group to form a staple through the other of the two olefin groups
  SITE 6: note = (S)-3-(2-amino-2-carboxyethyl)benzoic acid
  SITE 7: note = 2-amino-2-methylpropanoic acid
  SITE 10: note = L-lysine, useful for stapling/stapled with another amino acid residue comprising a side chain acid group to form a staple through the 6-amino group
  SITE 11: note (S)-3-amino-1-((pent-4-en-1-yloxy)carbonyl)pyrrolidine-3-ca rboxylic acid, useful for stapling/stapled with another amino acid residue comprising an olefin group to form a staple through the olefin group
  SITE 12: note = (S)-2-amino-4-phenylbutanoic acid
  SITE 13: note = (S)-2-amino-3-(benzo[b]thiophen-3-yl)propanoic acid
  SITE 14: note = L-glutamic acid, useful for stapling/stapled with another amino acid residue comprising a side chain amino group to form a staple through the 4-carboxyl group
  SITE 15: note = C-term amino
XDIXDXXAFKXXXEA

SEQ ID NO: 961 - protein, 15 aa, synthetic construct
  SITE 1: note = N-term Acetic Acid
  SITE 1: note = (R)-2-allylpyrrolidine-2-carboxylic acid, useful for stapling/stapled with another amino acid residue comprising an olefin group to form a staple through the olefin group
  VARIANT 4: note = 2-amino-2-(pent-4-en-1-yl)hept-6-enoic acid, useful for stapling/stapled with another amino acid residue comprising an olefin group to form a staple through one of the two olefin groups and/or with another amino acid residue comprising an olefin group to form a staple through the other of the two olefin groups
  SITE 6: note = (S)-3-(2-amino-2-carboxyethyl)benzoic acid
  SITE 7: note = 2-amino-2-methylpropanoic acid
  SITE 10: note = L-lysine, useful for stapling/stapled with another amino acid residue comprising a side chain acid group to form a staple through the 6-amino group
  SITE 11: note (S)-3-amino-1-((pent-4-en-1-yloxy)carbonyl)pyrrolidine-3-ca rboxylic acid, useful for stapling/stapled with another amino acid residue comprising an olefin group to form a staple through the olefin group
  SITE 12: note = (S)-2-amino-5-hydroxypentanoic acid
  SITE 13: note = (S)-2-amino-3-(benzo[b]thiophen-3-yl)propanoic acid
  SITE 14: note = L-glutamic acid, useful for stapling/stapled with another amino acid residue comprising a side chain amino group to form a staple through the 4-carboxyl group
  SITE 15: note = C-term amino
XDIXDXXAFKXXXEA

SEQ ID NO: 962 - protein, 15 aa, synthetic construct
  SITE 1: note = N-term Acetic Acid
  SITE 1: note = (R)-2-allylpyrrolidine-2-carboxylic acid, useful for stapling/stapled with another amino acid residue comprising an olefin group to form a staple through the olefin group
  VARIANT 4: note = 2-amino-2-(pent-4-en-1-yl)hept-6-enoic acid, useful for stapling/stapled with another amino acid residue comprising an olefin group to form a staple through one of the two olefin groups and/or with another amino acid residue comprising an olefin group to form a staple through the other of the two olefin groups
  SITE 6: note = (S)-3-(2-amino-2-carboxyethyl)benzoic acid
  SITE 7: note = 2-amino-2-methylpropanoic acid
  SITE 10: note = L-lysine, useful for stapling/stapled with another amino acid residue comprising a side chain acid group to form a staple through the 6-amino group
  SITE 11: note (S)-3-amino-1-((pent-4-en-1-yloxy)carbonyl)pyrrolidine-3-ca rboxylic acid, useful for stapling/stapled with another amino acid residue comprising an olefin group to form a staple through the olefin group
  SITE 12: note = (S)-2-amino-6-methylheptanoic acid
  SITE 13: note = (S)-2-amino-3-(3,4-dichlorophenyl)propanoic acid
  SITE 14: note = L-glutamic acid, useful for stapling/stapled with another amino acid residue comprising a side chain amino group to form a staple through the 4-carboxyl group
  SITE 15: note = C-term amino
XDIXDXXAFKXXXEA

SEQ ID NO: 963 - protein, 15 aa, synthetic construct
  SITE 1: note = N-term Acetic Acid
  SITE 1: note = (R)-2-allylpyrrolidine-2-carboxylic acid, useful for stapling/stapled with another amino acid residue comprising an olefin group to form a staple through the olefin group
  VARIANT 4: note = 2-amino-2-(pent-4-en-1-yl)hept-6-enoic acid, useful for stapling/stapled with another amino acid residue comprising an olefin group to form a staple through one of the two olefin groups and/or with another amino acid residue comprising an olefin group to form a staple through the other of the two olefin groups
  SITE 6: note = (S)-3-(2-amino-2-carboxyethyl)benzoic acid
  SITE 7: note = 2-amino-2-methylpropanoic acid
  SITE 10: note = L-lysine, useful for stapling/stapled with another amino acid residue comprising a side chain acid group to form a staple through the 6-amino group
  SITE 11: note (S)-3-amino-1-((pent-4-en-1-yloxy)carbonyl)pyrrolidine-3-ca rboxylic acid, useful for stapling/stapled with another amino acid residue comprising an olefin group to form a staple through the olefin group
  SITE 12: note = (S)-2-amino-4-phenylbutanoic acid
  SITE 13: note = (S)-2-amino-3-(3,4-dichlorophenyl)propanoic acid
  SITE 14: note = L-glutamic acid, useful for stapling/stapled with another amino acid residue comprising a side chain amino group to form a staple through the 4-carboxyl group
  SITE 15: note = C-term amino
XDIXDXXAFKXXXEA

SEQ ID NO: 964 - protein, 15 aa, synthetic construct
  SITE 1: note = N-term Acetic Acid
  SITE 1: note = (R)-2-allylpyrrolidine-2-carboxylic acid, useful for stapling/stapled with another amino acid residue comprising an olefin group to form a staple through the olefin group
  VARIANT 4: note = 2-amino-2-(pent-4-en-1-yl)hept-6-enoic acid, useful for stapling/stapled with another amino acid residue comprising an olefin group to form a staple through one of the two olefin groups and/or with another amino acid residue comprising an olefin group to form a staple through the other of the two olefin groups
  SITE 6: note = (S)-3-(2-amino-2-carboxyethyl)benzoic acid
  SITE 7: note = 2-amino-2-methylpropanoic acid
  SITE 10: note = L-lysine, useful for stapling/stapled with another amino acid residue comprising a side chain acid group to form a staple through the 6-amino group
  SITE 11: note (S)-3-amino-1-((pent-4-en-1-yloxy)carbonyl)pyrrolidine-3-ca rboxylic acid, useful for stapling/stapled with another amino acid residue comprising an olefin group to form a staple through the olefin group
  SITE 12: note = (S)-2-amino-5-hydroxypentanoic acid
  SITE 13: note = (S)-2-amino-3-(3,4-dichlorophenyl)propanoic acid
  SITE 14: note = L-glutamic acid, useful for stapling/stapled with another amino acid residue comprising a side chain amino group to form a staple through the 4-carboxyl group
  SITE 15: note = C-term amino
XDIXDXXAFKXXXEA

SEQ ID NO: 965 - protein, 15 aa, synthetic construct
  SITE 1: note = N-term Acetic Acid
  SITE 1: note = (R)-2-allylpyrrolidine-2-carboxylic acid, useful for stapling/stapled with another amino acid residue comprising an olefin group to form a staple through the olefin group
  SITE 3: note = (S)-2-amino-4,4-dimethylpentanoic acid
  VARIANT 4: note = 2-amino-2-(pent-4-en-1-yl)hept-6-enoic acid, useful for stapling/stapled with another amino acid residue comprising an olefin group to form a staple through one of the two olefin groups and/or with another amino acid residue comprising an olefin group to form a staple through the other of the two olefin groups
  SITE 6: note = (S)-3-(2-amino-2-carboxyethyl)benzoic acid
  SITE 7: note = 2-amino-2-methylpropanoic acid
  SITE 10: note = L-lysine, useful for stapling/stapled with another amino acid residue comprising a side chain acid group to form a staple through the 6-amino group
  SITE 11: note (S)-3-amino-1-((pent-4-en-1-yloxy)carbonyl)pyrrolidine-3-ca rboxylic acid, useful for stapling/stapled with another amino acid residue comprising an olefin group to form a staple through the olefin group
  SITE 12: note = (S)-2-amino-4-cyclobutylbutanoic acid
  SITE 13: note = (S)-2-amino-3-(benzo[b]thiophen-3-yl)propanoic acid
  SITE 14: note = L-glutamic acid, useful for stapling/stapled with another amino acid residue comprising a side chain amino group to form a staple through the 4-carboxyl group
  SITE 15: note = C-term amino
XDXXDXXAFKXXXEA

SEQ ID NO: 966 - protein, 15 aa, synthetic construct
  SITE 1: note = N-term Acetic Acid
  SITE 1: note = (R)-2-allylpyrrolidine-2-carboxylic acid, useful for stapling/stapled with another amino acid residue comprising an olefin group to form a staple through the olefin group
  SITE 3: note = (S)-2-amino-4,4-dimethylpentanoic acid
  VARIANT 4: note = 2-amino-2-(pent-4-en-1-yl)hept-6-enoic acid, useful for stapling/stapled with another amino acid residue comprising an olefin group to form a staple through one of the two olefin groups and/or with another amino acid residue comprising an olefin group to form a staple through the other of the two olefin groups
  SITE 6: note = (S)-3-(2-amino-2-carboxyethyl)benzoic acid
  SITE 7: note = 2-amino-2-methylpropanoic acid
  SITE 10: note = L-lysine, useful for stapling/stapled with another amino acid residue comprising a side chain acid group to form a staple through the 6-amino group
  SITE 11: note (S)-3-amino-1-((pent-4-en-1-yloxy)carbonyl)pyrrolidine-3-ca rboxylic acid, useful for stapling/stapled with another amino acid residue comprising an olefin group to form a staple through the olefin group
  SITE 12: note = (S)-2-amino-4-cyclopentylbutanoic acid
  SITE 13: note = (S)-2-amino-3-(benzo[b]thiophen-3-yl)propanoic acid
  SITE 14: note = L-glutamic acid, useful for stapling/stapled with another amino acid residue comprising a side chain amino group to form a staple through the 4-carboxyl group
  SITE 15: note = C-term amino
XDXXDXXAFKXXXEA

SEQ ID NO: 967 - protein, 15 aa, synthetic construct
  SITE 1: note = N-term Acetic Acid
  SITE 1: note = (R)-2-allylpyrrolidine-2-carboxylic acid, useful for stapling/stapled with another amino acid residue comprising an olefin group to form a staple through the olefin group
  SITE 3: note = (S)-2-amino-4,4-dimethylpentanoic acid
  VARIANT 4: note = 2-amino-2-(pent-4-en-1-yl)hept-6-enoic acid, useful for stapling/stapled with another amino acid residue comprising an olefin group to form a staple through one of the two olefin groups and/or with another amino acid residue comprising an olefin group to form a staple through the other of the two olefin groups
  SITE 6: note = (S)-3-(2-amino-2-carboxyethyl)benzoic acid
  SITE 7: note = 2-amino-2-methylpropanoic acid
  SITE 10: note = L-lysine, useful for stapling/stapled with another amino acid residue comprising a side chain acid group to form a staple through the 6-amino group
  SITE 11: note (S)-3-amino-1-((pent-4-en-1-yloxy)carbonyl)pyrrolidine-3-ca rboxylic acid, useful for stapling/stapled with another amino acid residue comprising an olefin group to form a staple through the olefin group
  SITE 12: note = (S)-2-amino-4-cyclohexylbutanoic acid
  SITE 13: note = (S)-2-amino-3-(benzo[b]thiophen-3-yl)propanoic acid
  SITE 14: note = L-glutamic acid, useful for stapling/stapled with another amino acid residue comprising a side chain amino group to form a staple through the 4-carboxyl group
  SITE 15: note = C-term amino
XDXXDXXAFKXXXEA

SEQ ID NO: 968 - protein, 15 aa, synthetic construct
  SITE 1: note = N-term Acetic Acid
  SITE 1: note = (R)-2-allylpyrrolidine-2-carboxylic acid, useful for stapling/stapled with another amino acid residue comprising an olefin group to form a staple through the olefin group
  SITE 3: note = (S)-2-amino-4,4-dimethylpentanoic acid
  VARIANT 4: note = 2-amino-2-(pent-4-en-1-yl)hept-6-enoic acid, useful for stapling/stapled with another amino acid residue comprising an olefin group to form a staple through one of the two olefin groups and/or with another amino acid residue comprising an olefin group to form a staple through the other of the two olefin groups
  SITE 6: note = (S)-3-(2-amino-2-carboxyethyl)benzoic acid
  SITE 7: note = 2-amino-2-methylpropanoic acid
  SITE 10: note = L-lysine, useful for stapling/stapled with another amino acid residue comprising a side chain acid group to form a staple through the 6-amino group
  SITE 11: note (S)-3-amino-1-((pent-4-en-1-yloxy)carbonyl)pyrrolidine-3-ca rboxylic acid, useful for stapling/stapled with another amino acid residue comprising an olefin group to form a staple through the olefin group
  SITE 12: note = (S)-2-amino-4-cyclobutylbutanoic acid
  SITE 13: note = (S)-2-amino-3-(3,4-dichlorophenyl)propanoic acid
  SITE 14: note = L-glutamic acid, useful for stapling/stapled with another amino acid residue comprising a side chain amino group to form a staple through the 4-carboxyl group
  SITE 15: note = C-term amino
XDXXDXXAFKXXXEA

SEQ ID NO: 969 - protein, 15 aa, synthetic construct
  SITE 1: note = N-term Acetic Acid
  SITE 1: note = (R)-2-allylpyrrolidine-2-carboxylic acid, useful for stapling/stapled with another amino acid residue comprising an olefin group to form a staple through the olefin group
  SITE 3: note = (S)-2-amino-4,4-dimethylpentanoic acid
  VARIANT 4: note = 2-amino-2-(pent-4-en-1-yl)hept-6-enoic acid, useful for stapling/stapled with another amino acid residue comprising an olefin group to form a staple through one of the two olefin groups and/or with another amino acid residue comprising an olefin group to form a staple through the other of the two olefin groups
  SITE 6: note = (S)-3-(2-amino-2-carboxyethyl)benzoic acid
  SITE 7: note = 2-amino-2-methylpropanoic acid
  SITE 10: note = L-lysine, useful for stapling/stapled with another amino acid residue comprising a side chain acid group to form a staple through the 6-amino group
  SITE 11: note (S)-3-amino-1-((pent-4-en-1-yloxy)carbonyl)pyrrolidine-3-ca rboxylic acid, useful for stapling/stapled with another amino acid residue comprising an olefin group to form a staple through the olefin group
  SITE 12: note = (S)-2-amino-4-cyclopentylbutanoic acid
  SITE 13: note = (S)-2-amino-3-(3,4-dichlorophenyl)propanoic acid
  SITE 14: note = L-glutamic acid, useful for stapling/stapled with another amino acid residue comprising a side chain amino group to form a staple through the 4-carboxyl group
  SITE 15: note = C-term amino
XDXXDXXAFKXXXEA

SEQ ID NO: 970 - protein, 15 aa, synthetic construct
  SITE 1: note = N-term Acetic Acid
  SITE 1: note = (R)-2-allylpyrrolidine-2-carboxylic acid, useful for stapling/stapled with another amino acid residue comprising an olefin group to form a staple through the olefin group
  SITE 3: note = (S)-2-amino-4,4-dimethylpentanoic acid
  VARIANT 4: note = 2-amino-2-(pent-4-en-1-yl)hept-6-enoic acid, useful for stapling/stapled with another amino acid residue comprising an olefin group to form a staple through one of the two olefin groups and/or with another amino acid residue comprising an olefin group to form a staple through the other of the two olefin groups
  SITE 6: note = (S)-3-(2-amino-2-carboxyethyl)benzoic acid
  SITE 7: note = 2-amino-2-methylpropanoic acid
  SITE 10: note = L-lysine, useful for stapling/stapled with another amino acid residue comprising a side chain acid group to form a staple through the 6-amino group
  SITE 11: note (S)-3-amino-1-((pent-4-en-1-yloxy)carbonyl)pyrrolidine-3-ca rboxylic acid, useful for stapling/stapled with another amino acid residue comprising an olefin group to form a staple through the olefin group
  SITE 12: note = (S)-2-amino-4-cyclohexylbutanoic acid
  SITE 13: note = (S)-2-amino-3-(3,4-dichlorophenyl)propanoic acid
  SITE 14: note = L-glutamic acid, useful for stapling/stapled with another amino acid residue comprising a side chain amino group to form a staple through the 4-carboxyl group
  SITE 15: note = C-term amino
XDXXDXXAFKXXXEA

SEQ ID NO: 971 - protein, 15 aa, synthetic construct
  SITE 1: note = N-term Acetic Acid
  SITE 1: note = (R)-2-allylpyrrolidine-2-carboxylic acid, useful for stapling/stapled with another amino acid residue comprising an olefin group to form a staple through the olefin group
  VARIANT 4: note = 2-amino-2-(pent-4-en-1-yl)hept-6-enoic acid, useful for stapling/stapled with another amino acid residue comprising an olefin group to form a staple through one of the two olefin groups and/or with another amino acid residue comprising an olefin group to form a staple through the other of the two olefin groups
  SITE 6: note = (S)-3-(2-amino-2-carboxyethyl)benzoic acid
  SITE 7: note = 2-amino-2-methylpropanoic acid
  SITE 10: note = L-lysine, useful for stapling/stapled with another amino acid residue comprising a side chain acid group to form a staple through the 6-amino group
  SITE 11: note (S)-3-amino-1-((pent-4-en-1-yloxy)carbonyl)pyrrolidine-3-ca rboxylic acid, useful for stapling/stapled with another amino acid residue comprising an olefin group to form a staple through the olefin group
  SITE 12: note = (S)-2-amino-4-cyclobutylbutanoic acid
  SITE 13: note = (S)-2-amino-3-(benzo[b]thiophen-3-yl)propanoic acid
  SITE 14: note = L-glutamic acid, useful for stapling/stapled with another amino acid residue comprising a side chain amino group to form a staple through the 4-carboxyl group
  SITE 15: note = C-term amino
XDIXDXXAFKXXXEA

SEQ ID NO: 972 - protein, 15 aa, synthetic construct
  SITE 1: note = N-term Acetic Acid
  SITE 1: note = (R)-2-allylpyrrolidine-2-carboxylic acid, useful for stapling/stapled with another amino acid residue comprising an olefin group to form a staple through the olefin group
  VARIANT 4: note = 2-amino-2-(pent-4-en-1-yl)hept-6-enoic acid, useful for stapling/stapled with another amino acid residue comprising an olefin group to form a staple through one of the two olefin groups and/or with another amino acid residue comprising an olefin group to form a staple through the other of the two olefin groups
  SITE 6: note = (S)-3-(2-amino-2-carboxyethyl)benzoic acid
  SITE 7: note = 2-amino-2-methylpropanoic acid
  SITE 10: note = L-lysine, useful for stapling/stapled with another amino acid residue comprising a side chain acid group to form a staple through the 6-amino group
  SITE 11: note (S)-3-amino-1-((pent-4-en-1-yloxy)carbonyl)pyrrolidine-3-ca rboxylic acid, useful for stapling/stapled with another amino acid residue comprising an olefin group to form a staple through the olefin group
  SITE 12: note = (S)-2-amino-4-cyclopentylbutanoic acid
  SITE 13: note = (S)-2-amino-3-(benzo[b]thiophen-3-yl)propanoic acid
  SITE 14: note = L-glutamic acid, useful for stapling/stapled with another amino acid residue comprising a side chain amino group to form a staple through the 4-carboxyl group
  SITE 15: note = C-term amino
XDIXDXXAFKXXXEA

SEQ ID NO: 973 - protein, 15 aa, synthetic construct
  SITE 1: note = N-term Acetic Acid
  SITE 1: note = (R)-2-allylpyrrolidine-2-carboxylic acid, useful for stapling/stapled with another amino acid residue comprising an olefin group to form a staple through the olefin group
  VARIANT 4: note = 2-amino-2-(pent-4-en-1-yl)hept-6-enoic acid, useful for stapling/stapled with another amino acid residue comprising an olefin group to form a staple through one of the two olefin groups and/or with another amino acid residue comprising an olefin group to form a staple through the other of the two olefin groups
  SITE 6: note = (S)-3-(2-amino-2-carboxyethyl)benzoic acid
  SITE 7: note = 2-amino-2-methylpropanoic acid
  SITE 10: note = L-lysine, useful for stapling/stapled with another amino acid residue comprising a side chain acid group to form a staple through the 6-amino group
  SITE 11: note (S)-3-amino-1-((pent-4-en-1-yloxy)carbonyl)pyrrolidine-3-ca rboxylic acid, useful for stapling/stapled with another amino acid residue comprising an olefin group to form a staple through the olefin group
  SITE 12: note = (S)-2-amino-4-cyclohexylbutanoic acid
  SITE 13: note = (S)-2-amino-3-(benzo[b]thiophen-3-yl)propanoic acid
  SITE 14: note = L-glutamic acid, useful for stapling/stapled with another amino acid residue comprising a side chain amino group to form a staple through the 4-carboxyl group
  SITE 15: note = C-term amino
XDIXDXXAFKXXXEA

SEQ ID NO: 974 - protein, 15 aa, synthetic construct
  SITE 1: note = N-term Acetic Acid
  SITE 1: note = (R)-2-allylpyrrolidine-2-carboxylic acid, useful for stapling/stapled with another amino acid residue comprising an olefin group to form a staple through the olefin group
  VARIANT 4: note = 2-amino-2-(pent-4-en-1-yl)hept-6-enoic acid, useful for stapling/stapled with another amino acid residue comprising an olefin group to form a staple through one of the two olefin groups and/or with another amino acid residue comprising an olefin group to form a staple through the other of the two olefin groups
  SITE 6: note = (S)-3-(2-amino-2-carboxyethyl)benzoic acid
  SITE 7: note = 2-amino-2-methylpropanoic acid
  SITE 10: note = L-lysine, useful for stapling/stapled with another amino acid residue comprising a side chain acid group to form a staple through the 6-amino group
  SITE 11: note (S)-3-amino-1-((pent-4-en-1-yloxy)carbonyl)pyrrolidine-3-ca rboxylic acid, useful for stapling/stapled with another amino acid residue comprising an olefin group to form a staple through the olefin group
  SITE 12: note = (S)-2-amino-4-cyclobutylbutanoic acid
  SITE 13: note = (S)-2-amino-3-(3,4-dichlorophenyl)propanoic acid
  SITE 14: note = L-glutamic acid, useful for stapling/stapled with another amino acid residue comprising a side chain amino group to form a staple through the 4-carboxyl group
  SITE 15: note = C-term amino
XDIXDXXAFKXXXEA

SEQ ID NO: 975 - protein, 15 aa, synthetic construct
  SITE 1: note = N-term Acetic Acid
  SITE 1: note = (R)-2-allylpyrrolidine-2-carboxylic acid, useful for stapling/stapled with another amino acid residue comprising an olefin group to form a staple through the olefin group
  VARIANT 4: note = 2-amino-2-(pent-4-en-1-yl)hept-6-enoic acid, useful for stapling/stapled with another amino acid residue comprising an olefin group to form a staple through one of the two olefin groups and/or with another amino acid residue comprising an olefin group to form a staple through the other of the two olefin groups
  SITE 6: note = (S)-3-(2-amino-2-carboxyethyl)benzoic acid
  SITE 7: note = 2-amino-2-methylpropanoic acid
  SITE 10: note = L-lysine, useful for stapling/stapled with another amino acid residue comprising a side chain acid group to form a staple through the 6-amino group
  SITE 11: note (S)-3-amino-1-((pent-4-en-1-yloxy)carbonyl)pyrrolidine-3-ca rboxylic acid, useful for stapling/stapled with another amino acid residue comprising an olefin group to form a staple through the olefin group
  SITE 12: note = (S)-2-amino-4-cyclopentylbutanoic acid
  SITE 13: note = (S)-2-amino-3-(3,4-dichlorophenyl)propanoic acid
  SITE 14: note = L-glutamic acid, useful for stapling/stapled with another amino acid residue comprising a side chain amino group to form a staple through the 4-carboxyl group
  SITE 15: note = C-term amino
XDIXDXXAFKXXXEA

SEQ ID NO: 976 - protein, 15 aa, synthetic construct
  SITE 1: note = N-term Acetic Acid
  SITE 1: note = (R)-2-allylpyrrolidine-2-carboxylic acid, useful for stapling/stapled with another amino acid residue comprising an olefin group to form a staple through the olefin group
  VARIANT 4: note = 2-amino-2-(pent-4-en-1-yl)hept-6-enoic acid, useful for stapling/stapled with another amino acid residue comprising an olefin group to form a staple through one of the two olefin groups and/or with another amino acid residue comprising an olefin group to form a staple through the other of the two olefin groups
  SITE 6: note = (S)-3-(2-amino-2-carboxyethyl)benzoic acid
  SITE 7: note = 2-amino-2-methylpropanoic acid
  SITE 10: note = L-lysine, useful for stapling/stapled with another amino acid residue comprising a side chain acid group to form a staple through the 6-amino group
  SITE 11: note (S)-3-amino-1-((pent-4-en-1-yloxy)carbonyl)pyrrolidine-3-ca rboxylic acid, useful for stapling/stapled with another amino acid residue comprising an olefin group to form a staple through the olefin group
  SITE 12: note = (S)-2-amino-4-cyclohexylbutanoic acid
  SITE 13: note = (S)-2-amino-3-(3,4-dichlorophenyl)propanoic acid
  SITE 14: note = L-glutamic acid, useful for stapling/stapled with another amino acid residue comprising a side chain amino group to form a staple through the 4-carboxyl group
  SITE 15: note = C-term amino
XDIXDXXAFKXXXEA

SEQ ID NO: 977 - protein, 16 aa, synthetic construct
  SITE 1: note = N-term Acetic Acid
  SITE 1: note = (S)-2-amino-2-methylhept-6-enoic acid, useful for stapling/stapled with another amino acid residue comprising an olefin group to form a staple through the olefin group
  SITE 4: note = (S)-2-amino-4,4-dimethylpentanoic acid
  VARIANT 5: note = 2-amino-2-(pent-4-en-1-yl)hept-6-enoic acid, useful for stapling/stapled with another amino acid residue comprising an olefin group to form a staple through one of the two olefin groups and/or with another amino acid residue comprising an olefin group to form a staple through the other of the two olefin groups
  SITE 8: note = 2-amino-2-methylpropanoic acid
  SITE 11: note = L-lysine, useful for stapling/stapled with another amino acid residue comprising a side chain acid group to form a staple through the 6-amino group
  SITE 12: note (S)-3-amino-1-((pent-4-en-1-yloxy)carbonyl)pyrrolidine-3-ca rboxylic acid, useful for stapling/stapled with another amino acid residue comprising an olefin group to form a staple through the olefin group
  SITE 13: note = (S)-2-amino-3-(thiophen-3-yl)propanoic acid
  SITE 14: note = (S)-2-amino-3-(benzo[b]thiophen-3-yl)propanoic acid
  SITE 15: note = L-glutamic acid, useful for stapling/stapled with another amino acid residue comprising a side chain amino group to form a staple through the 4-carboxyl group
  SITE 16: note = C-term amino
XADXXDDXAFKXXXEA

SEQ ID NO: 978 - protein, 16 aa, synthetic construct
  SITE 1: note = N-term Acetic Acid
  SITE 1: note = (S)-2-amino-2-methylhept-6-enoic acid, useful for stapling/stapled with another amino acid residue comprising an olefin group to form a staple through the olefin group
  SITE 4: note = (S)-2-amino-4,4-dimethylpentanoic acid
  VARIANT 5: note = 2-amino-2-(pent-4-en-1-yl)hept-6-enoic acid, useful for stapling/stapled with another amino acid residue comprising an olefin group to form a staple through one of the two olefin groups and/or with another amino acid residue comprising an olefin group to form a staple through the other of the two olefin groups
  SITE 8: note = 2-amino-2-methylpropanoic acid
  SITE 11: note = L-lysine, useful for stapling/stapled with another amino acid residue comprising a side chain acid group to form a staple through the 6-amino group
  SITE 12: note (S)-3-amino-1-((pent-4-en-1-yloxy)carbonyl)pyrrolidine-3-ca rboxylic acid, useful for stapling/stapled with another amino acid residue comprising an olefin group to form a staple through the olefin group
  SITE 13: note = (S)-2-amino-3-(thiophen-3-yl)propanoic acid
  SITE 14: note = (S)-2-amino-3-(benzo[b]thiophen-3-yl)propanoic acid
  SITE 15: note = L-glutamic acid, useful for stapling/stapled with another amino acid residue comprising a side chain amino group to form a staple through the 4-carboxyl group
  SITE 16: note = C-term amino
XADXXEDXAFKXXXEA

SEQ ID NO: 979 - protein, 16 aa, synthetic construct
  SITE 1: note = N-term Acetic Acid
  SITE 1: note = (S)-2-amino-2-methylhept-6-enoic acid, useful for stapling/stapled with another amino acid residue comprising an olefin group to form a staple through the olefin group
  SITE 4: note = (S)-2-amino-4,4-dimethylpentanoic acid
  VARIANT 5: note = 2-amino-2-(pent-4-en-1-yl)hept-6-enoic acid, useful for stapling/stapled with another amino acid residue comprising an olefin group to form a staple through one of the two olefin groups and/or with another amino acid residue comprising an olefin group to form a staple through the other of the two olefin groups
  SITE 6: note (S)-2-amino-3-((carboxymethyl)(2,2,2-trifluoroethyl)amino) propanoic acid
  SITE 8: note = 2-amino-2-methylpropanoic acid
  SITE 11: note = L-lysine, useful for stapling/stapled with another amino acid residue comprising a side chain acid group to form a staple through the 6-amino group
  SITE 12: note (S)-3-amino-1-((pent-4-en-1-yloxy)carbonyl)pyrrolidine-3-ca rboxylic acid, useful for stapling/stapled with another amino acid residue comprising an olefin group to form a staple through the olefin group
  SITE 13: note = (S)-2-amino-3-(thiophen-3-yl)propanoic acid
  SITE 14: note = (S)-2-amino-3-(benzo[b]thiophen-3-yl)propanoic acid
  SITE 15: note = L-glutamic acid, useful for stapling/stapled with another amino acid residue comprising a side chain amino group to form a staple through the 4-carboxyl group
  SITE 16: note = C-term amino
XADXXXDXAFKXXXEA

SEQ ID NO: 980 - protein, 16 aa, synthetic construct
  SITE 1: note = N-term Acetic Acid
  SITE 1: note = (S)-2-amino-2-methylhept-6-enoic acid, useful for stapling/stapled with another amino acid residue comprising an olefin group to form a staple through the olefin group
  SITE 4: note = (S)-2-amino-4,4-dimethylpentanoic acid
  VARIANT 5: note = 2-amino-2-(pent-4-en-1-yl)hept-6-enoic acid, useful for stapling/stapled with another amino acid residue comprising an olefin group to form a staple through one of the two olefin groups and/or with another amino acid residue comprising an olefin group to form a staple through the other of the two olefin groups
  SITE 8: note = 2-amino-2-methylpropanoic acid
  SITE 11: note = L-lysine, useful for stapling/stapled with another amino acid residue comprising a side chain acid group to form a staple through the 6-amino group
  SITE 12: note (S)-3-amino-1-((pent-4-en-1-yloxy)carbonyl)pyrrolidine-3-ca rboxylic acid, useful for stapling/stapled with another amino acid residue comprising an olefin group to form a staple through the olefin group
  SITE 13: note = (S)-2-amino-3-(thiophen-3-yl)propanoic acid
  SITE 14: note = (S)-2-amino-3-(benzo[b]thiophen-3-yl)propanoic acid
  SITE 15: note = L-glutamic acid, useful for stapling/stapled with another amino acid residue comprising a side chain amino group to form a staple through the 4-carboxyl group
  SITE 16: note = C-term amino
XPDXXDDXAFKXXXEA

SEQ ID NO: 981 - protein, 16 aa, synthetic construct
  SITE 1: note = N-term Acetic Acid
  SITE 1: note = (S)-2-amino-2-methylhept-6-enoic acid, useful for stapling/stapled with another amino acid residue comprising an olefin group to form a staple through the olefin group
  SITE 4: note = (S)-2-amino-4,4-dimethylpentanoic acid
  VARIANT 5: note = 2-amino-2-(pent-4-en-1-yl)hept-6-enoic acid, useful for stapling/stapled with another amino acid residue comprising an olefin group to form a staple through one of the two olefin groups and/or with another amino acid residue comprising an olefin group to form a staple through the other of the two olefin groups
  SITE 8: note = 2-amino-2-methylpropanoic acid
  SITE 11: note = L-lysine, useful for stapling/stapled with another amino acid residue comprising a side chain acid group to form a staple through the 6-amino group
  SITE 12: note (S)-3-amino-1-((pent-4-en-1-yloxy)carbonyl)pyrrolidine-3-ca rboxylic acid, useful for stapling/stapled with another amino acid residue comprising an olefin group to form a staple through the olefin group
  SITE 13: note = (S)-2-amino-3-(thiophen-3-yl)propanoic acid
  SITE 14: note = (S)-2-amino-3-(benzo[b]thiophen-3-yl)propanoic acid
  SITE 15: note = L-glutamic acid, useful for stapling/stapled with another amino acid residue comprising a side chain amino group to form a staple through the 4-carboxyl group
  SITE 16: note = C-term amino
XPDXXEDXAFKXXXEA

SEQ ID NO: 982 - protein, 16 aa, synthetic construct
  SITE 1: note = N-term Acetic Acid
  SITE 1: note = (S)-2-amino-2-methylhept-6-enoic acid, useful for stapling/stapled with another amino acid residue comprising an olefin group to form a staple through the olefin group
  SITE 4: note = (S)-2-amino-4,4-dimethylpentanoic acid
  VARIANT 5: note = 2-amino-2-(pent-4-en-1-yl)hept-6-enoic acid, useful for stapling/stapled with another amino acid residue comprising an olefin group to form a staple through one of the two olefin groups and/or with another amino acid residue comprising an olefin group to form a staple through the other of the two olefin groups
  SITE 6: note (S)-2-amino-3-((carboxymethyl)(2,2,2-trifluoroethyl)amino) propanoic acid
  SITE 8: note = 2-amino-2-methylpropanoic acid
  SITE 11: note = L-lysine, useful for stapling/stapled with another amino acid residue comprising a side chain acid group to form a staple through the 6-amino group
  SITE 12: note (S)-3-amino-1-((pent-4-en-1-yloxy)carbonyl)pyrrolidine-3-ca rboxylic acid, useful for stapling/stapled with another amino acid residue comprising an olefin group to form a staple through the olefin group
  SITE 13: note = (S)-2-amino-3-(thiophen-3-yl)propanoic acid
  SITE 14: note = (S)-2-amino-3-(benzo[b]thiophen-3-yl)propanoic acid
  SITE 15: note = L-glutamic acid, useful for stapling/stapled with another amino acid residue comprising a side chain amino group to form a staple through the 4-carboxyl group
  SITE 16: note = C-term amino
XPDXXXDXAFKXXXEA

SEQ ID NO: 983 - protein, 15 aa, synthetic construct
  SITE 1: note = N-term Acetic Acid
  SITE 1: note = (S)-2-amino-2-methylhept-6-enoic acid, useful for stapling/stapled with another amino acid residue comprising an olefin group to form a staple through the olefin group
  VARIANT 5: note = 2-amino-2-(pent-4-en-1-yl)hept-6-enoic acid, useful for stapling/stapled with another amino acid residue comprising an olefin group to form a staple through one of the two olefin groups and/or with another amino acid residue comprising an olefin group to form a staple through the other of the two olefin groups
  SITE 7: note = (S)-2-(2-amino-2-carboxyethyl)benzoic acid
  SITE 8: note = 2-amino-2-methylpropanoic acid
  SITE 11: note = L-lysine, useful for stapling/stapled with another amino acid residue comprising a side chain acid group to form a staple through the 6-amino group
  SITE 12: note (S)-3-amino-1-((pent-4-en-1-yloxy)carbonyl)pyrrolidine-3-ca rboxylic acid, useful for stapling/stapled with another amino acid residue comprising an olefin group to form a staple through the olefin group
  SITE 14: note = (S)-2-amino-3-(3,4-dichlorophenyl)propanoic acid
  SITE 15: note = L-glutamic acid, useful for stapling/stapled with another amino acid residue comprising a side chain amino group to form a staple through the 4-carboxyl group
  SITE 15: note = C-term amino
XADIXDXXAFKXFXE

SEQ ID NO: 984 - protein, 15 aa, synthetic construct
  SITE 1: note = N-term Acetic Acid
  SITE 1: note = (S)-2-amino-2-methylhept-6-enoic acid, useful for stapling/stapled with another amino acid residue comprising an olefin group to form a staple through the olefin group
  VARIANT 5: note = 2-amino-2-(pent-4-en-1-yl)hept-6-enoic acid, useful for stapling/stapled with another amino acid residue comprising an olefin group to form a staple through one of the two olefin groups and/or with another amino acid residue comprising an olefin group to form a staple through the other of the two olefin groups
  SITE 7: note = (S)-4-(2-amino-2-carboxyethyl)benzoic acid
  SITE 8: note = 2-amino-2-methylpropanoic acid
  SITE 11: note = L-lysine, useful for stapling/stapled with another amino acid residue comprising a side chain acid group to form a staple through the 6-amino group
  SITE 12: note (S)-3-amino-1-((pent-4-en-1-yloxy)carbonyl)pyrrolidine-3-ca rboxylic acid, useful for stapling/stapled with another amino acid residue comprising an olefin group to form a staple through the olefin group
  SITE 14: note = (S)-2-amino-3-(3,4-dichlorophenyl)propanoic acid
  SITE 15: note = L-glutamic acid, useful for stapling/stapled with another amino acid residue comprising a side chain amino group to form a staple through the 4-carboxyl group
  SITE 15: note = C-term amino
XADIXDXXAFKXFXE

SEQ ID NO: 985 - protein, 15 aa, synthetic construct
  SITE 1: note = N-term Acetic Acid
  SITE 1: note = (S)-2-amino-2-methylhept-6-enoic acid, useful for stapling/stapled with another amino acid residue comprising an olefin group to form a staple through the olefin group
  VARIANT 5: note = 2-amino-2-(pent-4-en-1-yl)hept-6-enoic acid, useful for stapling/stapled with another amino acid residue comprising an olefin group to form a staple through one of the two olefin groups and/or with another amino acid residue comprising an olefin group to form a staple through the other of the two olefin groups
  SITE 8: note = 2-amino-2-methylpropanoic acid
  SITE 11: note = L-lysine, useful for stapling/stapled with another amino acid residue comprising a side chain acid group to form a staple through the 6-amino group
  SITE 12: note (S)-3-amino-1-((pent-4-en-1-yloxy)carbonyl)pyrrolidine-3-ca rboxylic acid, useful for stapling/stapled with another amino acid residue comprising an olefin group to form a staple through the olefin group
  SITE 14: note = (S)-2-amino-3-(3,4-dichlorophenyl)propanoic acid
  SITE 15: note = L-glutamic acid, useful for stapling/stapled with another amino acid residue comprising a side chain amino group to form a staple through the 4-carboxyl group
  SITE 15: note = C-term amino
XADIXDDXAFKXFXE

SEQ ID NO: 986 - protein, 15 aa, synthetic construct
  SITE 1: note = N-term Acetic Acid
  SITE 1: note = (S)-2-amino-2-methylhept-6-enoic acid, useful for stapling/stapled with another amino acid residue comprising an olefin group to form a staple through the olefin group
  VARIANT 5: note = 2-amino-2-(pent-4-en-1-yl)hept-6-enoic acid, useful for stapling/stapled with another amino acid residue comprising an olefin group to form a staple through one of the two olefin groups and/or with another amino acid residue comprising an olefin group to form a staple through the other of the two olefin groups
  SITE 8: note = 2-amino-2-methylpropanoic acid
  SITE 11: note = L-lysine, useful for stapling/stapled with another amino acid residue comprising a side chain acid group to form a staple through the 6-amino group
  SITE 12: note (S)-3-amino-1-((pent-4-en-1-yloxy)carbonyl)pyrrolidine-3-ca rboxylic acid, useful for stapling/stapled with another amino acid residue comprising an olefin group to form a staple through the olefin group
  SITE 14: note = (S)-2-amino-3-(3,4-dichlorophenyl)propanoic acid
  SITE 15: note = L-glutamic acid, useful for stapling/stapled with another amino acid residue comprising a side chain amino group to form a staple through the 4-carboxyl group
  SITE 15: note = C-term amino
XADIXDEXAFKXFXE

SEQ ID NO: 987 - protein, 15 aa, synthetic construct
  SITE 1: note = N-term Acetic Acid
  SITE 1: note = (S)-2-amino-2-methylhept-6-enoic acid, useful for stapling/stapled with another amino acid residue comprising an olefin group to form a staple through the olefin group
  VARIANT 5: note = 2-amino-2-(pent-4-en-1-yl)hept-6-enoic acid, useful for stapling/stapled with another amino acid residue comprising an olefin group to form a staple through one of the two olefin groups and/or with another amino acid residue comprising an olefin group to form a staple through the other of the two olefin groups
  SITE 8: note = 2-amino-2-methylpropanoic acid
  SITE 11: note = L-lysine, useful for stapling/stapled with another amino acid residue comprising a side chain acid group to form a staple through the 6-amino group
  SITE 12: note (S)-3-amino-1-((pent-4-en-1-yloxy)carbonyl)pyrrolidine-3-ca rboxylic acid, useful for stapling/stapled with another amino acid residue comprising an olefin group to form a staple through the olefin group
  SITE 14: note = (S)-2-amino-3-(3,4-dichlorophenyl)propanoic acid
  SITE 15: note = L-glutamic acid, useful for stapling/stapled with another amino acid residue comprising a side chain amino group to form a staple through the 4-carboxyl group
  SITE 15: note = C-term amino
XADIXDNXAFKXFXE

SEQ ID NO: 988 - protein, 15 aa, synthetic construct
  SITE 1: note = N-term Acetic Acid
  SITE 1: note = (S)-2-amino-2-methylhept-6-enoic acid, useful for stapling/stapled with another amino acid residue comprising an olefin group to form a staple through the olefin group
  VARIANT 5: note = 2-amino-2-(pent-4-en-1-yl)hept-6-enoic acid, useful for stapling/stapled with another amino acid residue comprising an olefin group to form a staple through one of the two olefin groups and/or with another amino acid residue comprising an olefin group to form a staple through the other of the two olefin groups
  SITE 8: note = 2-amino-2-methylpropanoic acid
  SITE 11: note = L-lysine, useful for stapling/stapled with another amino acid residue comprising a side chain acid group to form a staple through the 6-amino group
  SITE 12: note (S)-3-amino-1-((pent-4-en-1-yloxy)carbonyl)pyrrolidine-3-ca rboxylic acid, useful for stapling/stapled with another amino acid residue comprising an olefin group to form a staple through the olefin group
  SITE 14: note = (S)-2-amino-3-(3,4-dichlorophenyl)propanoic acid
  SITE 15: note = L-glutamic acid, useful for stapling/stapled with another amino acid residue comprising a side chain amino group to form a staple through the 4-carboxyl group
  SITE 15: note = C-term amino
XADIXDQXAFKXFXE

SEQ ID NO: 989 - protein, 15 aa, synthetic construct
  SITE 1: note = N-term Acetic Acid
  SITE 1: note = (S)-2-amino-2-methylhept-6-enoic acid, useful for stapling/stapled with another amino acid residue comprising an olefin group to form a staple through the olefin group
  VARIANT 5: note = 2-amino-2-(pent-4-en-1-yl)hept-6-enoic acid, useful for stapling/stapled with another amino acid residue comprising an olefin group to form a staple through one of the two olefin groups and/or with another amino acid residue comprising an olefin group to form a staple through the other of the two olefin groups
  SITE 8: note = 2-amino-2-methylpropanoic acid
  SITE 11: note = L-lysine, useful for stapling/stapled with another amino acid residue comprising a side chain acid group to form a staple through the 6-amino group
  SITE 12: note (S)-3-amino-1-((pent-4-en-1-yloxy)carbonyl)pyrrolidine-3-ca rboxylic acid, useful for stapling/stapled with another amino acid residue comprising an olefin group to form a staple through the olefin group
  SITE 14: note = (S)-2-amino-3-(3,4-dichlorophenyl)propanoic acid
  SITE 15: note = L-glutamic acid, useful for stapling/stapled with another amino acid residue comprising a side chain amino group to form a staple through the 4-carboxyl group
  SITE 15: note = C-term amino
XADIXDSXAFKXFXE

SEQ ID NO: 990 - protein, 15 aa, synthetic construct
  SITE 1: note = N-term Acetic Acid
  SITE 1: note = (S)-2-amino-2-methylhept-6-enoic acid, useful for stapling/stapled with another amino acid residue comprising an olefin group to form a staple through the olefin group
  SITE 2: note = (S)-2-amino-3,3-dimethylbutanoic acid
  VARIANT 5: note = 2-amino-2-(pent-4-en-1-yl)hept-6-enoic acid, useful for stapling/stapled with another amino acid residue comprising an olefin group to form a staple through one of the two olefin groups and/or with another amino acid residue comprising an olefin group to form a staple through the other of the two olefin groups
  SITE 7: note = (S)-3-(2-amino-2-carboxyethyl)benzoic acid
  SITE 8: note = 2-amino-2-methylpropanoic acid
  SITE 11: note = L-lysine, useful for stapling/stapled with another amino acid residue comprising a side chain acid group to form a staple through the 6-amino group
  SITE 12: note (S)-3-amino-1-((pent-4-en-1-yloxy)carbonyl)pyrrolidine-3-ca rboxylic acid, useful for stapling/stapled with another amino acid residue comprising an olefin group to form a staple through the olefin group
  SITE 14: note = (S)-2-amino-3-(3,4-dichlorophenyl)propanoic acid
  SITE 15: note = L-glutamic acid, useful for stapling/stapled with another amino acid residue comprising a side chain amino group to form a staple through the 4-carboxyl group
  SITE 15: note = C-term amino
XXDIXDXXAFKXFXE

SEQ ID NO: 991 - protein, 15 aa, synthetic construct
  SITE 1: note = N-term Acetic Acid
  SITE 1: note = (S)-2-amino-2-methylhept-6-enoic acid, useful for stapling/stapled with another amino acid residue comprising an olefin group to form a staple through the olefin group
  VARIANT 5: note = 2-amino-2-(pent-4-en-1-yl)hept-6-enoic acid, useful for stapling/stapled with another amino acid residue comprising an olefin group to form a staple through one of the two olefin groups and/or with another amino acid residue comprising an olefin group to form a staple through the other of the two olefin groups
  SITE 7: note = (S)-3-(2-amino-2-carboxyethyl)benzoic acid
  SITE 8: note = 2-amino-2-methylpropanoic acid
  SITE 11: note = L-lysine, useful for stapling/stapled with another amino acid residue comprising a side chain acid group to form a staple through the 6-amino group
  SITE 12: note (S)-3-amino-1-((pent-4-en-1-yloxy)carbonyl)pyrrolidine-3-ca rboxylic acid, useful for stapling/stapled with another amino acid residue comprising an olefin group to form a staple through the olefin group
  SITE 14: note = (S)-2-amino-3-(3,4-dichlorophenyl)propanoic acid
  SITE 15: note = L-glutamic acid, useful for stapling/stapled with another amino acid residue comprising a side chain amino group to form a staple through the 4-carboxyl group
  SITE 15: note = C-term amino
XVDIXDXXAFKXFXE

SEQ ID NO: 992 - protein, 15 aa, synthetic construct
  SITE 1: note = N-term Acetic Acid
  SITE 1: note = (S)-2-amino-2-methylhept-6-enoic acid, useful for stapling/stapled with another amino acid residue comprising an olefin group to form a staple through the olefin group
  VARIANT 5: note = 2-amino-2-(pent-4-en-1-yl)hept-6-enoic acid, useful for stapling/stapled with another amino acid residue comprising an olefin group to form a staple through one of the two olefin groups and/or with another amino acid residue comprising an olefin group to form a staple through the other of the two olefin groups
  SITE 7: note = (S)-3-(2-amino-2-carboxyethyl)benzoic acid
  SITE 8: note = 2-amino-2-methylpropanoic acid
  SITE 11: note = L-lysine, useful for stapling/stapled with another amino acid residue comprising a side chain acid group to form a staple through the 6-amino group
  SITE 12: note (S)-3-amino-1-((pent-4-en-1-yloxy)carbonyl)pyrrolidine-3-ca rboxylic acid, useful for stapling/stapled with another amino acid residue comprising an olefin group to form a staple through the olefin group
  SITE 14: note = (S)-2-amino-3-(3,4-dichlorophenyl)propanoic acid
  SITE 15: note = L-glutamic acid, useful for stapling/stapled with another amino acid residue comprising a side chain amino group to form a staple through the 4-carboxyl group
  SITE 15: note = C-term amino
XIDIXDXXAFKXFXE

SEQ ID NO: 993 - protein, 17 aa, synthetic construct
  SITE 1: note = N-term Acetic Acid
  SITE 1: note = (R)-2-allylpyrrolidine-2-carboxylic acid, useful for stapling/stapled with another amino acid residue comprising an olefin group to form a staple through the olefin group
  SITE 3: note = (S)-2-amino-4,4-dimethylpentanoic acid
  VARIANT 4: note = 2-amino-2-(pent-4-en-1-yl)hept-6-enoic acid, useful for stapling/stapled with another amino acid residue comprising an olefin group to form a staple through one of the two olefin groups and/or with another amino acid residue comprising an olefin group to form a staple through the other of the two olefin groups
  SITE 6: note = (S)-3-(2-amino-2-carboxyethyl)benzoic acid
  SITE 7: note = 2-amino-2-methylpropanoic acid
  SITE 10: note = L-lysine, useful for stapling/stapled with another amino acid residue comprising a side chain acid group to form a staple through the 6-amino group
  SITE 11: note (S)-3-amino-1-((pent-4-en-1-yloxy)carbonyl)pyrrolidine-3-ca rboxylic acid, useful for stapling/stapled with another amino acid residue comprising an olefin group to form a staple through the olefin group
  SITE 12: note = (S)-2-amino-4-cyclobutylbutanoic acid
  SITE 13: note = (S)-2-amino-3-(benzo[b]thiophen-3-yl)propanoic acid
  SITE 14: note = L-glutamic acid, useful for stapling/stapled with another amino acid residue comprising a side chain amino group to form a staple through the 4-carboxyl group
  SITE 17: note = C-term amino
XDXXDXXAFKXXXEVEA

SEQ ID NO: 994 - protein, 17 aa, synthetic construct
  SITE 1: note = N-term Acetic Acid
  SITE 1: note = (R)-2-allylpyrrolidine-2-carboxylic acid, useful for stapling/stapled with another amino acid residue comprising an olefin group to form a staple through the olefin group
  SITE 3: note = (S)-2-amino-4,4-dimethylpentanoic acid
  VARIANT 4: note = 2-amino-2-(pent-4-en-1-yl)hept-6-enoic acid, useful for stapling/stapled with another amino acid residue comprising an olefin group to form a staple through one of the two olefin groups and/or with another amino acid residue comprising an olefin group to form a staple through the other of the two olefin groups
  SITE 6: note = (S)-3-(2-amino-2-carboxyethyl)benzoic acid
  SITE 7: note = 2-amino-2-methylpropanoic acid
  SITE 10: note = L-lysine, useful for stapling/stapled with another amino acid residue comprising a side chain acid group to form a staple through the 6-amino group
  SITE 11: note (S)-3-amino-1-((pent-4-en-1-yloxy)carbonyl)pyrrolidine-3-ca rboxylic acid, useful for stapling/stapled with another amino acid residue comprising an olefin group to form a staple through the olefin group
  SITE 12: note = (S)-2-amino-4-cyclopentylbutanoic acid
  SITE 13: note = (S)-2-amino-3-(benzo[b]thiophen-3-yl)propanoic acid
  SITE 14: note = L-glutamic acid, useful for stapling/stapled with another amino acid residue comprising a side chain amino group to form a staple through the 4-carboxyl group
  SITE 17: note = C-term amino
XDXXDXXAFKXXXEVEA

SEQ ID NO: 995 - protein, 17 aa, synthetic construct
  SITE 1: note = N-term Acetic Acid
  SITE 1: note = (R)-2-allylpyrrolidine-2-carboxylic acid, useful for stapling/stapled with another amino acid residue comprising an olefin group to form a staple through the olefin group
  SITE 3: note = (S)-2-amino-4,4-dimethylpentanoic acid
  VARIANT 4: note = 2-amino-2-(pent-4-en-1-yl)hept-6-enoic acid, useful for stapling/stapled with another amino acid residue comprising an olefin group to form a staple through one of the two olefin groups and/or with another amino acid residue comprising an olefin group to form a staple through the other of the two olefin groups
  SITE 6: note = (S)-3-(2-amino-2-carboxyethyl)benzoic acid
  SITE 7: note = 2-amino-2-methylpropanoic acid
  SITE 10: note = L-lysine, useful for stapling/stapled with another amino acid residue comprising a side chain acid group to form a staple through the 6-amino group
  SITE 11: note (S)-3-amino-1-((pent-4-en-1-yloxy)carbonyl)pyrrolidine-3-ca rboxylic acid, useful for stapling/stapled with another amino acid residue comprising an olefin group to form a staple through the olefin group
  SITE 12: note = (S)-2-amino-4-cyclohexylbutanoic acid
  SITE 13: note = (S)-2-amino-3-(benzo[b]thiophen-3-yl)propanoic acid
  SITE 14: note = L-glutamic acid, useful for stapling/stapled with another amino acid residue comprising a side chain amino group to form a staple through the 4-carboxyl group
  SITE 17: note = C-term amino
XDXXDXXAFKXXXEVEA

SEQ ID NO: 996 - protein, 17 aa, synthetic construct
  SITE 1: note = N-term Acetic Acid
  SITE 1: note = (R)-2-allylpyrrolidine-2-carboxylic acid, useful for stapling/stapled with another amino acid residue comprising an olefin group to form a staple through the olefin group
  SITE 3: note = (S)-2-amino-4,4-dimethylpentanoic acid
  VARIANT 4: note = 2-amino-2-(pent-4-en-1-yl)hept-6-enoic acid, useful for stapling/stapled with another amino acid residue comprising an olefin group to form a staple through one of the two olefin groups and/or with another amino acid residue comprising an olefin group to form a staple through the other of the two olefin groups
  SITE 6: note = (S)-3-(2-amino-2-carboxyethyl)benzoic acid
  SITE 7: note = 2-amino-2-methylpropanoic acid
  SITE 10: note = L-lysine, useful for stapling/stapled with another amino acid residue comprising a side chain acid group to form a staple through the 6-amino group
  SITE 11: note (S)-3-amino-1-((pent-4-en-1-yloxy)carbonyl)pyrrolidine-3-ca rboxylic acid, useful for stapling/stapled with another amino acid residue comprising an olefin group to form a staple through the olefin group
  SITE 12: note = (S)-2-amino-4-cyclobutylbutanoic acid
  SITE 13: note = (S)-2-amino-3-(3,4-dichlorophenyl)propanoic acid
  SITE 14: note = L-glutamic acid, useful for stapling/stapled with another amino acid residue comprising a side chain amino group to form a staple through the 4-carboxyl group
  SITE 17: note = C-term amino
XDXXDXXAFKXXXEVEA

SEQ ID NO: 997 - protein, 17 aa, synthetic construct
  SITE 1: note = N-term Acetic Acid
  SITE 1: note = (R)-2-allylpyrrolidine-2-carboxylic acid, useful for stapling/stapled with another amino acid residue comprising an olefin group to form a staple through the olefin group
  SITE 3: note = (S)-2-amino-4,4-dimethylpentanoic acid
  VARIANT 4: note = 2-amino-2-(pent-4-en-1-yl)hept-6-enoic acid, useful for stapling/stapled with another amino acid residue comprising an olefin group to form a staple through one of the two olefin groups and/or with another amino acid residue comprising an olefin group to form a staple through the other of the two olefin groups
  SITE 6: note = (S)-3-(2-amino-2-carboxyethyl)benzoic acid
  SITE 7: note = 2-amino-2-methylpropanoic acid
  SITE 10: note = L-lysine, useful for stapling/stapled with another amino acid residue comprising a side chain acid group to form a staple through the 6-amino group
  SITE 11: note (S)-3-amino-1-((pent-4-en-1-yloxy)carbonyl)pyrrolidine-3-ca rboxylic acid, useful for stapling/stapled with another amino acid residue comprising an olefin group to form a staple through the olefin group
  SITE 12: note = (S)-2-amino-4-cyclopentylbutanoic acid
  SITE 13: note = (S)-2-amino-3-(3,4-dichlorophenyl)propanoic acid
  SITE 14: note = L-glutamic acid, useful for stapling/stapled with another amino acid residue comprising a side chain amino group to form a staple through the 4-carboxyl group
  SITE 17: note = C-term amino
XDXXDXXAFKXXXEVEA

SEQ ID NO: 998 - protein, 17 aa, synthetic construct
  SITE 1: note = N-term Acetic Acid
  SITE 1: note = (R)-2-allylpyrrolidine-2-carboxylic acid, useful for stapling/stapled with another amino acid residue comprising an olefin group to form a staple through the olefin group
  SITE 3: note = (S)-2-amino-4,4-dimethylpentanoic acid
  VARIANT 4: note = 2-amino-2-(pent-4-en-1-yl)hept-6-enoic acid, useful for stapling/stapled with another amino acid residue comprising an olefin group to form a staple through one of the two olefin groups and/or with another amino acid residue comprising an olefin group to form a staple through the other of the two olefin groups
  SITE 6: note = (S)-3-(2-amino-2-carboxyethyl)benzoic acid
  SITE 7: note = 2-amino-2-methylpropanoic acid
  SITE 10: note = L-lysine, useful for stapling/stapled with another amino acid residue comprising a side chain acid group to form a staple through the 6-amino group
  SITE 11: note (S)-3-amino-1-((pent-4-en-1-yloxy)carbonyl)pyrrolidine-3-ca rboxylic acid, useful for stapling/stapled with another amino acid residue comprising an olefin group to form a staple through the olefin group
  SITE 12: note = (S)-2-amino-4-cyclohexylbutanoic acid
  SITE 13: note = (S)-2-amino-3-(3,4-dichlorophenyl)propanoic acid
  SITE 14: note = L-glutamic acid, useful for stapling/stapled with another amino acid residue comprising a side chain amino group to form a staple through the 4-carboxyl group
  SITE 17: note = C-term amino
XDXXDXXAFKXXXEVEA

SEQ ID NO: 999 - protein, 17 aa, synthetic construct
  SITE 1: note = N-term Acetic Acid
  SITE 1: note = (R)-2-allylpyrrolidine-2-carboxylic acid, useful for stapling/stapled with another amino acid residue comprising an olefin group to form a staple through the olefin group
  VARIANT 4: note = 2-amino-2-(pent-4-en-1-yl)hept-6-enoic acid, useful for stapling/stapled with another amino acid residue comprising an olefin group to form a staple through one of the two olefin groups and/or with another amino acid residue comprising an olefin group to form a staple through the other of the two olefin groups
  SITE 6: note = (S)-3-(2-amino-2-carboxyethyl)benzoic acid
  SITE 7: note = 2-amino-2-methylpropanoic acid
  SITE 10: note = L-lysine, useful for stapling/stapled with another amino acid residue comprising a side chain acid group to form a staple through the 6-amino group
  SITE 11: note (S)-3-amino-1-((pent-4-en-1-yloxy)carbonyl)pyrrolidine-3-ca rboxylic acid, useful for stapling/stapled with another amino acid residue comprising an olefin group to form a staple through the olefin group
  SITE 13: note = (S)-2-amino-3-(3,4-dichlorophenyl)propanoic acid
  SITE 14: note = L-glutamic acid, useful for stapling/stapled with another amino acid residue comprising a side chain amino group to form a staple through the 4-carboxyl group
  SITE 17: note = C-term amino
XDIXDXXAFKXFXETEA

SEQ ID NO: 1000 - protein, 17 aa, synthetic construct
  SITE 1: note = N-term Acetic Acid
  SITE 1: note = (R)-2-allylpyrrolidine-2-carboxylic acid, useful for stapling/stapled with another amino acid residue comprising an olefin group to form a staple through the olefin group
  VARIANT 4: note = 2-amino-2-(pent-4-en-1-yl)hept-6-enoic acid, useful for stapling/stapled with another amino acid residue comprising an olefin group to form a staple through one of the two olefin groups and/or with another amino acid residue comprising an olefin group to form a staple through the other of the two olefin groups
  SITE 6: note = (S)-3-(2-amino-2-carboxyethyl)benzoic acid
  SITE 7: note = 2-amino-2-methylpropanoic acid
  SITE 10: note = L-lysine, useful for stapling/stapled with another amino acid residue comprising a side chain acid group to form a staple through the 6-amino group
  SITE 11: note (S)-3-amino-1-((pent-4-en-1-yloxy)carbonyl)pyrrolidine-3-ca rboxylic acid, useful for stapling/stapled with another amino acid residue comprising an olefin group to form a staple through the olefin group
  SITE 13: note = (S)-2-amino-3-(3,4-dichlorophenyl)propanoic acid
  SITE 14: note = L-glutamic acid, useful for stapling/stapled with another amino acid residue comprising a side chain amino group to form a staple through the 4-carboxyl group
  SITE 17: note = C-term amino
XDIXDXXAFKXFXESEA

SEQ ID NO: 1001 - protein, 17 aa, synthetic construct
  SITE 1: note = N-term Acetic Acid
  SITE 1: note = (R)-2-allylpyrrolidine-2-carboxylic acid, useful for stapling/stapled with another amino acid residue comprising an olefin group to form a staple through the olefin group
  VARIANT 4: note = 2-amino-2-(pent-4-en-1-yl)hept-6-enoic acid, useful for stapling/stapled with another amino acid residue comprising an olefin group to form a staple through one of the two olefin groups and/or with another amino acid residue comprising an olefin group to form a staple through the other of the two olefin groups
  SITE 6: note = (S)-3-(2-amino-2-carboxyethyl)benzoic acid
  SITE 7: note = 2-amino-2-methylpropanoic acid
  SITE 10: note = L-lysine, useful for stapling/stapled with another amino acid residue comprising a side chain acid group to form a staple through the 6-amino group
  SITE 11: note (S)-3-amino-1-((pent-4-en-1-yloxy)carbonyl)pyrrolidine-3-ca rboxylic acid, useful for stapling/stapled with another amino acid residue comprising an olefin group to form a staple through the olefin group
  SITE 13: note = (S)-2-amino-3-(3,4-dichlorophenyl)propanoic acid
  SITE 14: note = L-glutamic acid, useful for stapling/stapled with another amino acid residue comprising a side chain amino group to form a staple through the 4-carboxyl group
  SITE 17: note = C-term amino
XDIXDXXAFKXFXETSA

SEQ ID NO: 1002 - protein, 17 aa, synthetic construct
  SITE 1: note = N-term Acetic Acid
  SITE 1: note = (R)-2-allylpyrrolidine-2-carboxylic acid, useful for stapling/stapled with another amino acid residue comprising an olefin group to form a staple through the olefin group
  VARIANT 4: note = 2-amino-2-(pent-4-en-1-yl)hept-6-enoic acid, useful for stapling/stapled with another amino acid residue comprising an olefin group to form a staple through one of the two olefin groups and/or with another amino acid residue comprising an olefin group to form a staple through the other of the two olefin groups
  SITE 6: note = (S)-3-(2-amino-2-carboxyethyl)benzoic acid
  SITE 7: note = 2-amino-2-methylpropanoic acid
  SITE 10: note = L-lysine, useful for stapling/stapled with another amino acid residue comprising a side chain acid group to form a staple through the 6-amino group
  SITE 11: note (S)-3-amino-1-((pent-4-en-1-yloxy)carbonyl)pyrrolidine-3-ca rboxylic acid, useful for stapling/stapled with another amino acid residue comprising an olefin group to form a staple through the olefin group
  SITE 13: note = (S)-2-amino-3-(3,4-dichlorophenyl)propanoic acid
  SITE 14: note = L-glutamic acid, useful for stapling/stapled with another amino acid residue comprising a side chain amino group to form a staple through the 4-carboxyl group
  SITE 17: note = C-term amino
XDIXDXXAFKXFXESSA

SEQ ID NO: 1003 - protein, 17 aa, synthetic construct
  SITE 1: note = N-term Acetic Acid
  SITE 1: note = (R)-2-allylpyrrolidine-2-carboxylic acid, useful for stapling/stapled with another amino acid residue comprising an olefin group to form a staple through the olefin group
  VARIANT 4: note = 2-amino-2-(pent-4-en-1-yl)hept-6-enoic acid, useful for stapling/stapled with another amino acid residue comprising an olefin group to form a staple through one of the two olefin groups and/or with another amino acid residue comprising an olefin group to form a staple through the other of the two olefin groups
  SITE 6: note = (S)-3-(2-amino-2-carboxyethyl)benzoic acid
  SITE 7: note = 2-amino-2-methylpropanoic acid
  SITE 10: note = L-lysine, useful for stapling/stapled with another amino acid residue comprising a side chain acid group to form a staple through the 6-amino group
  SITE 11: note (S)-3-amino-1-((pent-4-en-1-yloxy)carbonyl)pyrrolidine-3-ca rboxylic acid, useful for stapling/stapled with another amino acid residue comprising an olefin group to form a staple through the olefin group
  SITE 13: note = (S)-2-amino-3-(3,4-dichlorophenyl)propanoic acid
  SITE 14: note = L-glutamic acid, useful for stapling/stapled with another amino acid residue comprising a side chain amino group to form a staple through the 4-carboxyl group
  SITE 17: note = C-term amino
XDIXDXXAFKXFXETKA

SEQ ID NO: 1004 - protein, 17 aa, synthetic construct
  SITE 1: note = N-term Acetic Acid
  SITE 1: note = (R)-2-allylpyrrolidine-2-carboxylic acid, useful for stapling/stapled with another amino acid residue comprising an olefin group to form a staple through the olefin group
  VARIANT 4: note = 2-amino-2-(pent-4-en-1-yl)hept-6-enoic acid, useful for stapling/stapled with another amino acid residue comprising an olefin group to form a staple through one of the two olefin groups and/or with another amino acid residue comprising an olefin group to form a staple through the other of the two olefin groups
  SITE 6: note = (S)-3-(2-amino-2-carboxyethyl)benzoic acid
  SITE 7: note = 2-amino-2-methylpropanoic acid
  SITE 10: note = L-lysine, useful for stapling/stapled with another amino acid residue comprising a side chain acid group to form a staple through the 6-amino group
  SITE 11: note (S)-3-amino-1-((pent-4-en-1-yloxy)carbonyl)pyrrolidine-3-ca rboxylic acid, useful for stapling/stapled with another amino acid residue comprising an olefin group to form a staple through the olefin group
  SITE 13: note = (S)-2-amino-3-(3,4-dichlorophenyl)propanoic acid
  SITE 14: note = L-glutamic acid, useful for stapling/stapled with another amino acid residue comprising a side chain amino group to form a staple through the 4-carboxyl group
  SITE 17: note = C-term amino
XDIXDXXAFKXFXESKA

SEQ ID NO: 1005 - protein, 17 aa, synthetic construct
  SITE 1: note = N-term Acetic Acid
  SITE 1: note = (R)-2-allylpyrrolidine-2-carboxylic acid, useful for stapling/stapled with another amino acid residue comprising an olefin group to form a staple through the olefin group
  VARIANT 4: note = 2-amino-2-(pent-4-en-1-yl)hept-6-enoic acid, useful for stapling/stapled with another amino acid residue comprising an olefin group to form a staple through one of the two olefin groups and/or with another amino acid residue comprising an olefin group to form a staple through the other of the two olefin groups
  SITE 6: note = (S)-3-(2-amino-2-carboxyethyl)benzoic acid
  SITE 7: note = 2-amino-2-methylpropanoic acid
  SITE 10: note = L-lysine, useful for stapling/stapled with another amino acid residue comprising a side chain acid group to form a staple through the 6-amino group
  SITE 11: note (S)-3-amino-1-((pent-4-en-1-yloxy)carbonyl)pyrrolidine-3-ca rboxylic acid, useful for stapling/stapled with another amino acid residue comprising an olefin group to form a staple through the olefin group
  SITE 13: note = (S)-2-amino-3-(3,4-dichlorophenyl)propanoic acid
  SITE 14: note = L-glutamic acid, useful for stapling/stapled with another amino acid residue comprising a side chain amino group to form a staple through the 4-carboxyl group
  SITE 17: note = C-term amino
XDIXDXXAFKXFXETEL

SEQ ID NO: 1006 - protein, 17 aa, synthetic construct
  SITE 1: note = N-term Acetic Acid
  SITE 1: note = (R)-2-allylpyrrolidine-2-carboxylic acid, useful for stapling/stapled with another amino acid residue comprising an olefin group to form a staple through the olefin group
  VARIANT 4: note = 2-amino-2-(pent-4-en-1-yl)hept-6-enoic acid, useful for stapling/stapled with another amino acid residue comprising an olefin group to form a staple through one of the two olefin groups and/or with another amino acid residue comprising an olefin group to form a staple through the other of the two olefin groups
  SITE 6: note = (S)-3-(2-amino-2-carboxyethyl)benzoic acid
  SITE 7: note = 2-amino-2-methylpropanoic acid
  SITE 10: note = L-lysine, useful for stapling/stapled with another amino acid residue comprising a side chain acid group to form a staple through the 6-amino group
  SITE 11: note (S)-3-amino-1-((pent-4-en-1-yloxy)carbonyl)pyrrolidine-3-ca rboxylic acid, useful for stapling/stapled with another amino acid residue comprising an olefin group to form a staple through the olefin group
  SITE 13: note = (S)-2-amino-3-(3,4-dichlorophenyl)propanoic acid
  SITE 14: note = L-glutamic acid, useful for stapling/stapled with another amino acid residue comprising a side chain amino group to form a staple through the 4-carboxyl group
  SITE 17: note = C-term amino
XDIXDXXAFKXFXESEL

SEQ ID NO: 1007 - protein, 17 aa, synthetic construct
  SITE 1: note = N-term Acetic Acid
  SITE 1: note = (R)-2-allylpyrrolidine-2-carboxylic acid, useful for stapling/stapled with another amino acid residue comprising an olefin group to form a staple through the olefin group
  VARIANT 4: note = 2-amino-2-(pent-4-en-1-yl)hept-6-enoic acid, useful for stapling/stapled with another amino acid residue comprising an olefin group to form a staple through one of the two olefin groups and/or with another amino acid residue comprising an olefin group to form a staple through the other of the two olefin groups
  SITE 6: note = (S)-3-(2-amino-2-carboxyethyl)benzoic acid
  SITE 7: note = 2-amino-2-methylpropanoic acid
  SITE 10: note = L-lysine, useful for stapling/stapled with another amino acid residue comprising a side chain acid group to form a staple through the 6-amino group
  SITE 11: note (S)-3-amino-1-((pent-4-en-1-yloxy)carbonyl)pyrrolidine-3-ca rboxylic acid, useful for stapling/stapled with another amino acid residue comprising an olefin group to form a staple through the olefin group
  SITE 13: note = (S)-2-amino-3-(3,4-dichlorophenyl)propanoic acid
  SITE 14: note = L-glutamic acid, useful for stapling/stapled with another amino acid residue comprising a side chain amino group to form a staple through the 4-carboxyl group
  SITE 17: note = C-term amino
XDIXDXXAFKXFXETSL

SEQ ID NO: 1008 - protein, 17 aa, synthetic construct
  SITE 1: note = N-term Acetic Acid
  SITE 1: note = (R)-2-allylpyrrolidine-2-carboxylic acid, useful for stapling/stapled with another amino acid residue comprising an olefin group to form a staple through the olefin group
  VARIANT 4: note = 2-amino-2-(pent-4-en-1-yl)hept-6-enoic acid, useful for stapling/stapled with another amino acid residue comprising an olefin group to form a staple through one of the two olefin groups and/or with another amino acid residue comprising an olefin group to form a staple through the other of the two olefin groups
  SITE 6: note = (S)-3-(2-amino-2-carboxyethyl)benzoic acid
  SITE 7: note = 2-amino-2-methylpropanoic acid
  SITE 10: note = L-lysine, useful for stapling/stapled with another amino acid residue comprising a side chain acid group to form a staple through the 6-amino group
  SITE 11: note (S)-3-amino-1-((pent-4-en-1-yloxy)carbonyl)pyrrolidine-3-ca rboxylic acid, useful for stapling/stapled with another amino acid residue comprising an olefin group to form a staple through the olefin group
  SITE 13: note = (S)-2-amino-3-(3,4-dichlorophenyl)propanoic acid
  SITE 14: note = L-glutamic acid, useful for stapling/stapled with another amino acid residue comprising a side chain amino group to form a staple through the 4-carboxyl group
  SITE 17: note = C-term amino
XDIXDXXAFKXFXESSL

SEQ ID NO: 1009 - protein, 17 aa, synthetic construct
  SITE 1: note = N-term Acetic Acid
  SITE 1: note = (R)-2-allylpyrrolidine-2-carboxylic acid, useful for stapling/stapled with another amino acid residue comprising an olefin group to form a staple through the olefin group
  VARIANT 4: note = 2-amino-2-(pent-4-en-1-yl)hept-6-enoic acid, useful for stapling/stapled with another amino acid residue comprising an olefin group to form a staple through one of the two olefin groups and/or with another amino acid residue comprising an olefin group to form a staple through the other of the two olefin groups
  SITE 6: note = (S)-3-(2-amino-2-carboxyethyl)benzoic acid
  SITE 7: note = 2-amino-2-methylpropanoic acid
  SITE 10: note = L-lysine, useful for stapling/stapled with another amino acid residue comprising a side chain acid group to form a staple through the 6-amino group
  SITE 11: note (S)-3-amino-1-((pent-4-en-1-yloxy)carbonyl)pyrrolidine-3-ca rboxylic acid, useful for stapling/stapled with another amino acid residue comprising an olefin group to form a staple through the olefin group
  SITE 13: note = (S)-2-amino-3-(3,4-dichlorophenyl)propanoic acid
  SITE 14: note = L-glutamic acid, useful for stapling/stapled with another amino acid residue comprising a side chain amino group to form a staple through the 4-carboxyl group
  SITE 17: note = C-term amino
XDIXDXXAFKXFXETKL

SEQ ID NO: 1010 - protein, 17 aa, synthetic construct
  SITE 1: note = N-term Acetic Acid
  SITE 1: note = (R)-2-allylpyrrolidine-2-carboxylic acid, useful for stapling/stapled with another amino acid residue comprising an olefin group to form a staple through the olefin group
  VARIANT 4: note = 2-amino-2-(pent-4-en-1-yl)hept-6-enoic acid, useful for stapling/stapled with another amino acid residue comprising an olefin group to form a staple through one of the two olefin groups and/or with another amino acid residue comprising an olefin group to form a staple through the other of the two olefin groups
  SITE 6: note = (S)-3-(2-amino-2-carboxyethyl)benzoic acid
  SITE 7: note = 2-amino-2-methylpropanoic acid
  SITE 10: note = L-lysine, useful for stapling/stapled with another amino acid residue comprising a side chain acid group to form a staple through the 6-amino group
  SITE 11: note (S)-3-amino-1-((pent-4-en-1-yloxy)carbonyl)pyrrolidine-3-ca rboxylic acid, useful for stapling/stapled with another amino acid residue comprising an olefin group to form a staple through the olefin group
  SITE 13: note = (S)-2-amino-3-(3,4-dichlorophenyl)propanoic acid
  SITE 14: note = L-glutamic acid, useful for stapling/stapled with another amino acid residue comprising a side chain amino group to form a staple through the 4-carboxyl group
  SITE 17: note = C-term amino
XDIXDXXAFKXFXESKL

SEQ ID NO: 1011 - protein, 15 aa, synthetic construct
  SITE 1: note = N-term Acetic Acid
  SITE 1: note = (R)-2-allylpyrrolidine-2-carboxylic acid, useful for stapling/stapled with another amino acid residue comprising an olefin group to form a staple through the olefin group
  SITE 3: note = (S)-2-amino-4,4-dimethylpentanoic acid
  VARIANT 4: note = 2-amino-2-(pent-4-en-1-yl)hept-6-enoic acid, useful for stapling/stapled with another amino acid residue comprising an olefin group to form a staple through one of the two olefin groups and/or with another amino acid residue comprising an olefin group to form a staple through the other of the two olefin groups
  SITE 6: note = (S)-3-(2-amino-2-carboxyethyl)benzoic acid
  SITE 7: note = 2-amino-2-methylpropanoic acid
  SITE 11: note (S)-2-amino-3-(4-amino-N-(hept-6-en-1-yl)butanamido)propano ic acid, useful for stapling/stapled with another amino acid residue comprising an olefin group to form a staple through the olefin group and useful for stapling/stapled with another amino acid residue comprising a side chain acid group to form a staple through the amino group in the side chain
  SITE 12: note = (S)-2-amino-3-(thiophen-3-yl)propanoic acid
  SITE 13: note = (S)-2-amino-3-(benzo[b]thiophen-3-yl)propanoic acid
  SITE 15: note = L-glutamic acid, useful for stapling/stapled with another amino acid residue comprising a side chain amino group to form a staple through the 4-carboxyl group in the side chain
  SITE 15: note = C-term amino
XDXXDXXAFLXXXAE

SEQ ID NO: 1012 - protein, 15 aa, synthetic construct
  SITE 1: note = N-term Acetic Acid
  SITE 1: note = (R)-2-allylpyrrolidine-2-carboxylic acid, useful for stapling/stapled with another amino acid residue comprising an olefin group to form a staple through the olefin group
  SITE 3: note = (S)-2-amino-4,4-dimethylpentanoic acid
  VARIANT 4: note = 2-amino-2-(pent-4-en-1-yl)hept-6-enoic acid, useful for stapling/stapled with another amino acid residue comprising an olefin group to form a staple through one of the two olefin groups and/or with another amino acid residue comprising an olefin group to form a staple through the other of the two olefin groups
  SITE 6: note = (S)-3-(2-amino-2-carboxyethyl)benzoic acid
  SITE 7: note = 2-amino-2-methylpropanoic acid
  SITE 11: note (S)-2-amino-3-(N-(2-aminoethyl)hept-6-enamido)propanoic acid, useful for stapling/stapled with another amino acid residue comprising an olefin group to form a staple through the olefin group and useful for stapling/stapled with another amino acid residue comprising a side chain acid group to form a staple through the amino group in the side chain
  SITE 12: note = (S)-2-amino-3-(thiophen-3-yl)propanoic acid
  SITE 13: note = (S)-2-amino-3-(benzo[b]thiophen-3-yl)propanoic acid
  SITE 15: note = L-glutamic acid, useful for stapling/stapled with another amino acid residue comprising a side chain amino group to form a staple through the 4-carboxyl group in the side chain
  SITE 15: note = C-term amino
XDXXDXXAFLXXXAE

SEQ ID NO: 1013 - protein, 15 aa, synthetic construct
  SITE 1: note = N-term Acetic Acid
  SITE 1: note = (R)-2-allylpyrrolidine-2-carboxylic acid, useful for stapling/stapled with another amino acid residue comprising an olefin group to form a staple through the olefin group
  SITE 3: note = (S)-2-amino-4,4-dimethylpentanoic acid
  VARIANT 4: note = 2-amino-2-(pent-4-en-1-yl)hept-6-enoic acid, useful for stapling/stapled with another amino acid residue comprising an olefin group to form a staple through one of the two olefin groups and/or with another amino acid residue comprising an olefin group to form a staple through the other of the two olefin groups
  SITE 6: note = (S)-3-(2-amino-2-carboxyethyl)benzoic acid
  SITE 7: note = 2-amino-2-methylpropanoic acid
  SITE 10: note = Cysteine, sulfur bonded to the methyl at position 1 of 1,3,5-trimethylbenzene, useful for stapling/stapled with another thiol through the methyl at position 3 of 1,3,5-trimethylbenzene
  SITE 11: note (S)-3-amino-1-((pent-4-en-1-yloxy)carbonyl)pyrrolidine-3-ca rboxylic acid, useful for stapling/stapled with another amino acid residue comprising an olefin group to form a staple through the olefin group
  SITE 12: note = (S)-2-amino-3-(thiophen-3-yl)propanoic acid
  SITE 13: note = (S)-2-amino-3-(benzo[b]thiophen-3-yl)propanoic acid
  SITE 15: note = C-term amino
XDXXDXXAFCXXXCA

SEQ ID NO: 1014 - protein, 15 aa, synthetic construct
  SITE 1: note = N-term Acetic Acid
  SITE 1: note = (R)-2-allylpyrrolidine-2-carboxylic acid, useful for stapling/stapled with another amino acid residue comprising an olefin group to form a staple through the olefin group
  SITE 3: note = (S)-2-amino-4,4-dimethylpentanoic acid
  VARIANT 4: note = 2-amino-2-(pent-4-en-1-yl)hept-6-enoic acid, useful for stapling/stapled with another amino acid residue comprising an olefin group to form a staple through one of the two olefin groups and/or with another amino acid residue comprising an olefin group to form a staple through the other of the two olefin groups
  SITE 6: note = (S)-3-(2-amino-2-carboxyethyl)benzoic acid
  SITE 7: note = 2-amino-2-methylpropanoic acid
  SITE 10: note = L-homocysteine, sulfur bonded to the methyl at position 1 of 1,3,5-trimethylbenzene, useful for stapling/stapled with another thiol through the methyl at position 3 of 1,3,5-trimethylbenzene
  SITE 11: note (S)-3-amino-1-((pent-4-en-1-yloxy)carbonyl)pyrrolidine-3-ca rboxylic acid, useful for stapling/stapled with another amino acid residue comprising an olefin group to form a staple through the olefin group
  SITE 12: note = (S)-2-amino-3-(thiophen-3-yl)propanoic acid
  SITE 13: note = (S)-2-amino-3-(benzo[b]thiophen-3-yl)propanoic acid
  SITE 15: note = C-term amino
XDXXDXXAFCXXXCA

SEQ ID NO: 1015 - protein, 14 aa, synthetic construct
  SITE 1: note = N-term Acetic Acid
  SITE 1: note = (R)-2-allylpyrrolidine-2-carboxylic acid, useful for stapling/stapled with another amino acid residue comprising an olefin group to form a staple through the olefin group
  VARIANT 4: note = 2-amino-2-(pent-4-en-1-yl)hept-6-enoic acid, useful for stapling/stapled with another amino acid residue comprising an olefin group to form a staple through one of the two olefin groups and/or with another amino acid residue comprising an olefin group to form a staple through the other of the two olefin groups
  SITE 6: note = (S)-3-(2-amino-2-carboxyethyl)benzoic acid
  SITE 7: note = 2-amino-2-methylpropanoic acid
  SITE 10: note = L-glutamic acid, useful for stapling/stapled with another amino acid residue comprising a side chain amino group to form a staple through the 4-carboxyl group
  SITE 11: note (S)-3-amino-1-((pent-4-en-1-yloxy)carbonyl)pyrrolidine-3-ca rboxylic acid, useful for stapling/stapled with another amino acid residue comprising an olefin group to form a staple through the olefin group
  SITE 13: note = (S)-2-amino-3-(3,4-dichlorophenyl)propanoic acid
  SITE 14: note = L-lysine, useful for stapling/stapled with another amino acid residue comprising a side chain acid group to form a staple through the 6-amino group
  SITE 14: note = C-term amino
XDIXDXXAFEXFXK

SEQ ID NO: 1016 - protein, 14 aa, synthetic construct
  SITE 1: note = N-term Acetic Acid
  SITE 1: note = (R)-2-allylpyrrolidine-2-carboxylic acid, useful for stapling/stapled with another amino acid residue comprising an olefin group to form a staple through the olefin group
  VARIANT 4: note = 2-amino-2-(pent-4-en-1-yl)hept-6-enoic acid, useful for stapling/stapled with another amino acid residue comprising an olefin group to form a staple through one of the two olefin groups and/or with another amino acid residue comprising an olefin group to form a staple through the other of the two olefin groups
  SITE 6: note = (S)-3-(2-amino-2-carboxyethyl)benzoic acid
  SITE 7: note = 2-amino-2-methylpropanoic acid
  SITE 10: note = N6-methyl-L-lysine, useful for stapling/stapled with another amino acid residue comprising a side chain acid group to form a staple through the side chain amino group
  SITE 11: note (S)-3-amino-1-((pent-4-en-1-yloxy)carbonyl)pyrrolidine-3-ca rboxylic acid, useful for stapling/stapled with another amino acid residue comprising an olefin group to form a staple through the olefin group
  SITE 13: note = (S)-2-amino-3-(3,4-dichlorophenyl)propanoic acid
  SITE 14: note = L-glutamic acid, useful for stapling/stapled with another amino acid residue comprising a side chain amino group to form a staple through the 4-carboxyl group
  SITE 14: note = C-term amino
XDIXDXXAFKXFXE

SEQ ID NO: 1017 - protein, 14 aa, synthetic construct
  SITE 1: note = N-term Acetic Acid
  SITE 1: note = (R)-2-allylpyrrolidine-2-carboxylic acid, useful for stapling/stapled with another amino acid residue comprising an olefin group to form a staple through the olefin group
  VARIANT 4: note = 2-amino-2-(pent-4-en-1-yl)hept-6-enoic acid, useful for stapling/stapled with another amino acid residue comprising an olefin group to form a staple through one of the two olefin groups and/or with another amino acid residue comprising an olefin group to form a staple through the other of the two olefin groups
  SITE 6: note = (S)-3-(2-amino-2-carboxyethyl)benzoic acid
  SITE 7: note = 2-amino-2-methylpropanoic acid
  SITE 10: note = L-glutamic acid, useful for stapling/stapled with another amino acid residue comprising a side chain amino group to form a staple through the 4-carboxyl group
  SITE 11: note (S)-3-amino-1-((pent-4-en-1-yloxy)carbonyl)pyrrolidine-3-ca rboxylic acid, useful for stapling/stapled with another amino acid residue comprising an olefin group to form a staple through the olefin group
  SITE 13: note = (S)-2-amino-3-(3,4-dichlorophenyl)propanoic acid
  SITE 14: note = N6-methyl-L-lysine, useful for stapling/stapled with another amino acid residue comprising a side chain acid group to form a staple through the side chain amino group
  SITE 14: note = C-term amino
XDIXDXXAFEXFXK

SEQ ID NO: 1018 - protein, 14 aa, synthetic construct
  SITE 1: note = N-term Acetic Acid
  SITE 1: note = (R)-2-allylpyrrolidine-2-carboxylic acid, useful for stapling/stapled with another amino acid residue comprising an olefin group to form a staple through the olefin group
  VARIANT 4: note = 2-amino-2-(pent-4-en-1-yl)hept-6-enoic acid, useful for stapling/stapled with another amino acid residue comprising an olefin group to form a staple through one of the two olefin groups and/or with another amino acid residue comprising an olefin group to form a staple through the other of the two olefin groups
  SITE 6: note = (S)-3-(2-amino-2-carboxyethyl)benzoic acid
  SITE 7: note = 2-amino-2-methylpropanoic acid
  SITE 10: note = L-lysine, useful for stapling/stapled with another amino acid residue comprising a side chain acid group to form a staple through the 6-amino group
  SITE 11: note (S)-3-amino-1-((pent-4-en-1-yloxy)carbonyl)pyrrolidine-3-ca rboxylic acid, useful for stapling/stapled with another amino acid residue comprising an olefin group to form a staple through the olefin group
  SITE 13: note = (S)-2-amino-3-(3,4-dichlorophenyl)propanoic acid
  SITE 14: note = (S)-2-aminohexanedioic acid, useful for stapling/stapled with another amino acid residue comprising a side chain amino group to form a staple through the 5-carboxyl group
  SITE 14: note = C-term amino
XDIXDXXAFKXFXX

SEQ ID NO: 1019 - protein, 14 aa, synthetic construct
  SITE 1: note = N-term Acetic Acid
  SITE 1: note = (R)-2-allylpyrrolidine-2-carboxylic acid, useful for stapling/stapled with another amino acid residue comprising an olefin group to form a staple through the olefin group
  VARIANT 4: note = 2-amino-2-(pent-4-en-1-yl)hept-6-enoic acid, useful for stapling/stapled with another amino acid residue comprising an olefin group to form a staple through one of the two olefin groups and/or with another amino acid residue comprising an olefin group to form a staple through the other of the two olefin groups
  SITE 6: note = (S)-3-(2-amino-2-carboxyethyl)benzoic acid
  SITE 7: note = 2-amino-2-methylpropanoic acid
  SITE 10: note = (S)-2-aminohexanedioic acid, useful for stapling/stapled with another amino acid residue comprising a side chain amino group to form a staple through the 5-carboxyl group
  SITE 11: note (S)-3-amino-1-((pent-4-en-1-yloxy)carbonyl)pyrrolidine-3-ca rboxylic acid, useful for stapling/stapled with another amino acid residue comprising an olefin group to form a staple through the olefin group
  SITE 13: note = (S)-2-amino-3-(3,4-dichlorophenyl)propanoic acid
  SITE 14: note = L-lysine, useful for stapling/stapled with another amino acid residue comprising a side chain acid group to form a staple through the 6-amino group
  SITE 14: note = C-term amino
XDIXDXXAFXXFXK

SEQ ID NO: 1020 - protein, 14 aa, synthetic construct
  SITE 1: note = N-term Acetic Acid
  SITE 1: note = (R)-2-allylpyrrolidine-2-carboxylic acid, useful for stapling/stapled with another amino acid residue comprising an olefin group to form a staple through the olefin group
  VARIANT 4: note = 2-amino-2-(pent-4-en-1-yl)hept-6-enoic acid, useful for stapling/stapled with another amino acid residue comprising an olefin group to form a staple through one of the two olefin groups and/or with another amino acid residue comprising an olefin group to form a staple through the other of the two olefin groups
  SITE 6: note = (S)-3-(2-amino-2-carboxyethyl)benzoic acid
  SITE 7: note = 2-amino-2-methylpropanoic acid
  SITE 10: note = N6-methyl-L-lysine, useful for stapling/stapled with another amino acid residue comprising a side chain acid group to form a staple through the side chain amino group
  SITE 11: note (S)-3-amino-1-((pent-4-en-1-yloxy)carbonyl)pyrrolidine-3-ca rboxylic acid, useful for stapling/stapled with another amino acid residue comprising an olefin group to form a staple through the olefin group
  SITE 13: note = (S)-2-amino-3-(3,4-dichlorophenyl)propanoic acid
  SITE 14: note = (S)-2-aminohexanedioic acid, useful for stapling/stapled with another amino acid residue comprising a side chain amino group to form a staple through the 5-carboxyl group
  SITE 14: note = C-term amino
XDIXDXXAFKXFXX

SEQ ID NO: 1021 - protein, 14 aa, synthetic construct
  SITE 1: note = N-term Acetic Acid
  SITE 1: note = (R)-2-allylpyrrolidine-2-carboxylic acid, useful for stapling/stapled with another amino acid residue comprising an olefin group to form a staple through the olefin group
  VARIANT 4: note = 2-amino-2-(pent-4-en-1-yl)hept-6-enoic acid, useful for stapling/stapled with another amino acid residue comprising an olefin group to form a staple through one of the two olefin groups and/or with another amino acid residue comprising an olefin group to form a staple through the other of the two olefin groups
  SITE 6: note = (S)-3-(2-amino-2-carboxyethyl)benzoic acid
  SITE 7: note = 2-amino-2-methylpropanoic acid
  SITE 10: note = (S)-2-aminohexanedioic acid, useful for stapling/stapled with another amino acid residue comprising a side chain amino group to form a staple through the 5-carboxyl group
  SITE 11: note (S)-3-amino-1-((pent-4-en-1-yloxy)carbonyl)pyrrolidine-3-ca rboxylic acid, useful for stapling/stapled with another amino acid residue comprising an olefin group to form a staple through the olefin group
  SITE 13: note = (S)-2-amino-3-(3,4-dichlorophenyl)propanoic acid
  SITE 14: note = N6-methyl-L-lysine, useful for stapling/stapled with another amino acid residue comprising a side chain acid group to form a staple through the side chain amino group
  SITE 14: note = C-term amino
XDIXDXXAFXXFXK

SEQ ID NO: 1022 - protein, 14 aa, synthetic construct
  SITE 1: note = N-term Acetic Acid
  SITE 1: note = (R)-2-allylpyrrolidine-2-carboxylic acid, useful for stapling/stapled with another amino acid residue comprising an olefin group to form a staple through the olefin group
  VARIANT 4: note = 2-amino-2-(pent-4-en-1-yl)hept-6-enoic acid, useful for stapling/stapled with another amino acid residue comprising an olefin group to form a staple through one of the two olefin groups and/or with another amino acid residue comprising an olefin group to form a staple through the other of the two olefin groups
  SITE 6: note = (S)-3-(2-amino-2-carboxyethyl)benzoic acid
  SITE 7: note = 2-amino-2-methylpropanoic acid
  SITE 10: note = L-glutamic acid, useful for stapling/stapled with another amino acid residue comprising a side chain amino group to form a staple through the 4-carboxyl group
  SITE 11: note (S)-3-amino-1-((pent-4-en-1-yloxy)carbonyl)pyrrolidine-3-ca rboxylic acid, useful for stapling/stapled with another amino acid residue comprising an olefin group to form a staple through the olefin group
  SITE 13: note = (S)-2-amino-3-(3,4-dichlorophenyl)propanoic acid
  SITE 14: note = N4-(2-aminoethyl)-L-asparagine, useful for stapling/stapled with another amino acid residue comprising a side chain acid group to form a staple through the amino group in the side chain
  SITE 14: note = C-term amino
XDIXDXXAFEXFXN

SEQ ID NO: 1023 - protein, 14 aa, synthetic construct
  SITE 1: note = N-term Acetic Acid
  SITE 1: note = (R)-2-allylpyrrolidine-2-carboxylic acid, useful for stapling/stapled with another amino acid residue comprising an olefin group to form a staple through the olefin group
  VARIANT 4: note = 2-amino-2-(pent-4-en-1-yl)hept-6-enoic acid, useful for stapling/stapled with another amino acid residue comprising an olefin group to form a staple through one of the two olefin groups and/or with another amino acid residue comprising an olefin group to form a staple through the other of the two olefin groups
  SITE 6: note = (S)-3-(2-amino-2-carboxyethyl)benzoic acid
  SITE 7: note = 2-amino-2-methylpropanoic acid
  SITE 10: note = L-glutamic acid, useful for stapling/stapled with another amino acid residue comprising a side chain amino group to form a staple through the 4-carboxyl group
  SITE 11: note (S)-3-amino-1-((pent-4-en-1-yloxy)carbonyl)pyrrolidine-3-ca rboxylic acid, useful for stapling/stapled with another amino acid residue comprising an olefin group to form a staple through the olefin group
  SITE 13: note = (S)-2-amino-3-(3,4-dichlorophenyl)propanoic acid
  SITE 14: note = N5-(2-aminoethyl)-L-glutamine, useful for stapling/stapled with another amino acid residue comprising a side chain acid group to form a staple through the amino group in the side chain
  SITE 14: note = C-term amino
XDIXDXXAFEXFXQ

SEQ ID NO: 1024 - protein, 14 aa, synthetic construct
  SITE 1: note = N-term Acetic Acid
  SITE 1: note = (R)-2-allylpyrrolidine-2-carboxylic acid, useful for stapling/stapled with another amino acid residue comprising an olefin group to form a staple through the olefin group
  VARIANT 4: note = 2-amino-2-(pent-4-en-1-yl)hept-6-enoic acid, useful for stapling/stapled with another amino acid residue comprising an olefin group to form a staple through one of the two olefin groups and/or with another amino acid residue comprising an olefin group to form a staple through the other of the two olefin groups
  SITE 6: note = (S)-3-(2-amino-2-carboxyethyl)benzoic acid
  SITE 7: note = 2-amino-2-methylpropanoic acid
  SITE 10: note = L-glutamic acid, useful for stapling/stapled with another amino acid residue comprising a side chain amino group to form a staple through the 4-carboxyl group
  SITE 11: note (S)-3-amino-1-((pent-4-en-1-yloxy)carbonyl)pyrrolidine-3-ca rboxylic acid, useful for stapling/stapled with another amino acid residue comprising an olefin group to form a staple through the olefin group
  SITE 13: note = (S)-2-amino-3-(3,4-dichlorophenyl)propanoic acid
  SITE 14: note = (S)-2-amino-4-oxo-4-(piperazin-1-yl)butanoic acid, useful for stapling/stapled with another amino acid residue comprising a side chain acid group to form a staple through the amino group in the side chain
  SITE 14: note = C-term amino
XDIXDXXAFEXFXX

SEQ ID NO: 1025 - protein, 14 aa, synthetic construct
  SITE 1: note = N-term Acetic Acid
  SITE 1: note = (R)-2-allylpyrrolidine-2-carboxylic acid, useful for stapling/stapled with another amino acid residue comprising an olefin group to form a staple through the olefin group
  VARIANT 4: note = 2-amino-2-(pent-4-en-1-yl)hept-6-enoic acid, useful for stapling/stapled with another amino acid residue comprising an olefin group to form a staple through one of the two olefin groups and/or with another amino acid residue comprising an olefin group to form a staple through the other of the two olefin groups
  SITE 6: note = (S)-3-(2-amino-2-carboxyethyl)benzoic acid
  SITE 7: note = 2-amino-2-methylpropanoic acid
  SITE 10: note = L-glutamic acid, useful for stapling/stapled with another amino acid residue comprising a side chain amino group to form a staple through the 4-carboxyl group
  SITE 11: note (S)-3-amino-1-((pent-4-en-1-yloxy)carbonyl)pyrrolidine-3-ca rboxylic acid, useful for stapling/stapled with another amino acid residue comprising an olefin group to form a staple through the olefin group
  SITE 13: note = (S)-2-amino-3-(3,4-dichlorophenyl)propanoic acid
  SITE 14: note = (S)-2-amino-5-oxo-5-(piperazin-1-yl)pentanoic acid, useful for stapling/stapled with another amino acid residue comprising a side chain acid group to form a staple through the amino group in the side chain
  SITE 14: note = C-term amino
XDIXDXXAFEXFXX

SEQ ID NO: 1026 - protein, 14 aa, synthetic construct
  SITE 1: note = N-term Acetic Acid
  SITE 1: note = (R)-2-allylpyrrolidine-2-carboxylic acid, useful for stapling/stapled with another amino acid residue comprising an olefin group to form a staple through the olefin group
  VARIANT 4: note = 2-amino-2-(pent-4-en-1-yl)hept-6-enoic acid, useful for stapling/stapled with another amino acid residue comprising an olefin group to form a staple through one of the two olefin groups and/or with another amino acid residue comprising an olefin group to form a staple through the other of the two olefin groups
  SITE 6: note = (S)-3-(2-amino-2-carboxyethyl)benzoic acid
  SITE 7: note = 2-amino-2-methylpropanoic acid
  SITE 10: note = N5-((R)-pyrrolidin-3-yl)-L-glutamine, useful for stapling/stapled with another amino acid residue comprising a side chain acid group to form a staple through the amino group in the side chain
  SITE 11: note (S)-3-amino-1-((pent-4-en-1-yloxy)carbonyl)pyrrolidine-3-ca rboxylic acid, useful for stapling/stapled with another amino acid residue comprising an olefin group to form a staple through the olefin group
  SITE 13: note = (S)-2-amino-3-(3,4-dichlorophenyl)propanoic acid
  SITE 14: note = L-glutamic acid, useful for stapling/stapled with another amino acid residue comprising a side chain amino group to form a staple through the 4-carboxyl group
  SITE 14: note = C-term amino
XDIXDXXAFQXFXE

SEQ ID NO: 1027 - protein, 14 aa, synthetic construct
  SITE 1: note = N-term Acetic Acid
  SITE 1: note = (R)-2-allylpyrrolidine-2-carboxylic acid, useful for stapling/stapled with another amino acid residue comprising an olefin group to form a staple through the olefin group
  VARIANT 4: note = 2-amino-2-(pent-4-en-1-yl)hept-6-enoic acid, useful for stapling/stapled with another amino acid residue comprising an olefin group to form a staple through one of the two olefin groups and/or with another amino acid residue comprising an olefin group to form a staple through the other of the two olefin groups
  SITE 6: note = (S)-3-(2-amino-2-carboxyethyl)benzoic acid
  SITE 7: note = 2-amino-2-methylpropanoic acid
  SITE 10: note = L-glutamic acid, useful for stapling/stapled with another amino acid residue comprising a side chain amino group to form a staple through the 4-carboxyl group
  SITE 11: note (S)-3-amino-1-((pent-4-en-1-yloxy)carbonyl)pyrrolidine-3-ca rboxylic acid, useful for stapling/stapled with another amino acid residue comprising an olefin group to form a staple through the olefin group
  SITE 13: note = (S)-2-amino-3-(3,4-dichlorophenyl)propanoic acid
  SITE 14: note = N5-((R)-pyrrolidin-3-yl)-L-glutamine, useful for stapling/stapled with another amino acid residue comprising a side chain acid group to form a staple through the amino group in the side chain
  SITE 14: note = C-term amino
XDIXDXXAFEXFXQ

SEQ ID NO: 1028 - protein, 14 aa, synthetic construct
  SITE 1: note = N-term Acetic Acid
  SITE 1: note = (R)-2-allylpyrrolidine-2-carboxylic acid, useful for stapling/stapled with another amino acid residue comprising an olefin group to form a staple through the olefin group
  VARIANT 4: note = 2-amino-2-(pent-4-en-1-yl)hept-6-enoic acid, useful for stapling/stapled with another amino acid residue comprising an olefin group to form a staple through one of the two olefin groups and/or with another amino acid residue comprising an olefin group to form a staple through the other of the two olefin groups
  SITE 6: note = (S)-3-(2-amino-2-carboxyethyl)benzoic acid
  SITE 7: note = 2-amino-2-methylpropanoic acid
  SITE 10: note = N5-((S)-pyrrolidin-3-yl)-L-glutamine, useful for stapling/stapled with another amino acid residue comprising a side chain acid group to form a staple through the amino group in the side chain
  SITE 11: note (S)-3-amino-1-((pent-4-en-1-yloxy)carbonyl)pyrrolidine-3-ca rboxylic acid, useful for stapling/stapled with another amino acid residue comprising an olefin group to form a staple through the olefin group
  SITE 13: note = (S)-2-amino-3-(3,4-dichlorophenyl)propanoic acid
  SITE 14: note = L-glutamic acid, useful for stapling/stapled with another amino acid residue comprising a side chain amino group to form a staple through the 4-carboxyl group
  SITE 14: note = C-term amino
XDIXDXXAFQXFXE

SEQ ID NO: 1029 - protein, 14 aa, synthetic construct
  SITE 1: note = N-term Acetic Acid
  SITE 1: note = (R)-2-allylpyrrolidine-2-carboxylic acid, useful for stapling/stapled with another amino acid residue comprising an olefin group to form a staple through the olefin group
  VARIANT 4: note = 2-amino-2-(pent-4-en-1-yl)hept-6-enoic acid, useful for stapling/stapled with another amino acid residue comprising an olefin group to form a staple through one of the two olefin groups and/or with another amino acid residue comprising an olefin group to form a staple through the other of the two olefin groups
  SITE 6: note = (S)-3-(2-amino-2-carboxyethyl)benzoic acid
  SITE 7: note = 2-amino-2-methylpropanoic acid
  SITE 10: note = L-glutamic acid, useful for stapling/stapled with another amino acid residue comprising a side chain amino group to form a staple through the 4-carboxyl group
  SITE 11: note (S)-3-amino-1-((pent-4-en-1-yloxy)carbonyl)pyrrolidine-3-ca rboxylic acid, useful for stapling/stapled with another amino acid residue comprising an olefin group to form a staple through the olefin group
  SITE 13: note = (S)-2-amino-3-(3,4-dichlorophenyl)propanoic acid
  SITE 14: note = N5-((S)-pyrrolidin-3-yl)-L-glutamine, useful for stapling/stapled with another amino acid residue comprising a side chain acid group to form a staple through the amino group in the side chain
  SITE 14: note = C-term amino
XDIXDXXAFEXFXQ

SEQ ID NO: 1030 - protein, 15 aa, synthetic construct
  SITE 1: note = N-term Acetic Acid
  SITE 1: note = (R)-2-allylpyrrolidine-2-carboxylic acid, useful for stapling/stapled with another amino acid residue comprising an olefin group to form a staple through the olefin group
  SITE 3: note = (S)-2-amino-4,4-dimethylpentanoic acid
  VARIANT 4: note = 2-amino-2-(pent-4-en-1-yl)hept-6-enoic acid, useful for stapling/stapled with another amino acid residue comprising an olefin group to form a staple through one of the two olefin groups and/or with another amino acid residue comprising an olefin group to form a staple through the other of the two olefin groups
  SITE 6: note = (S)-3-(2-amino-2-carboxyethyl)benzoic acid
  SITE 7: note = 2-amino-2-methylpropanoic acid
  SITE 10: note = Cysteine, sulfur bonded to the methyl at position 1 of 1,3-dimethylbenzene, useful for stapling/stapled with another thiol through the methyl at position 3 of 1,3-dimethylbenzene
  SITE 11: note (S)-3-amino-1-((pent-4-en-1-yloxy)carbonyl)pyrrolidine-3-ca rboxylic acid, useful for stapling/stapled with another amino acid residue comprising an olefin group to form a staple through the olefin group
  SITE 12: note = (S)-2-amino-3-(thiophen-3-yl)propanoic acid
  SITE 13: note = (S)-2-amino-3-(benzo[b]thiophen-3-yl)propanoic acid
  SITE 14: note = (R)-2-amino-3-mercapto-2-methylpropanoic acid, useful for stapling/stapled with another amino acid residue to form a staple through the thiol group
  SITE 15: note = C-term amino
XDXXDXXAFCXXXXA

SEQ ID NO: 1031 - protein, 15 aa, synthetic construct
  SITE 1: note = N-term Acetic Acid
  SITE 1: note = (R)-2-allylpyrrolidine-2-carboxylic acid, useful for stapling/stapled with another amino acid residue comprising an olefin group to form a staple through the olefin group
  SITE 3: note = (S)-2-amino-4,4-dimethylpentanoic acid
  VARIANT 4: note = 2-amino-2-(pent-4-en-1-yl)hept-6-enoic acid, useful for stapling/stapled with another amino acid residue comprising an olefin group to form a staple through one of the two olefin groups and/or with another amino acid residue comprising an olefin group to form a staple through the other of the two olefin groups
  SITE 6: note = (S)-3-(2-amino-2-carboxyethyl)benzoic acid
  SITE 7: note = 2-amino-2-methylpropanoic acid
  SITE 10: note = Cysteine, sulfur bonded to the methyl at position 2 of 2,6-dimethylpyridine, useful for stapling/stapled with another thiol through the methyl position 6 of 2,6-dimethylpyridine
  SITE 11: note (S)-3-amino-1-((pent-4-en-1-yloxy)carbonyl)pyrrolidine-3-ca rboxylic acid, useful for stapling/stapled with another amino acid residue comprising an olefin group to form a staple through the olefin group
  SITE 12: note = (S)-2-amino-3-(thiophen-3-yl)propanoic acid
  SITE 13: note = (S)-2-amino-3-(benzo[b]thiophen-3-yl)propanoic acid
  SITE 14: note = (R)-2-amino-3-mercapto-2-methylpropanoic acid, useful for stapling/stapled with another amino acid residue to form a staple through the thiol group
  SITE 15: note = C-term amino
XDXXDXXAFCXXXXA

SEQ ID NO: 1032 - protein, 15 aa, synthetic construct
  SITE 1: note = N-term Acetic Acid
  SITE 1: note = (R)-2-allylpyrrolidine-2-carboxylic acid, useful for stapling/stapled with another amino acid residue comprising an olefin group to form a staple through the olefin group
  SITE 3: note = (S)-2-amino-4,4-dimethylpentanoic acid
  VARIANT 4: note = 2-amino-2-(pent-4-en-1-yl)hept-6-enoic acid, useful for stapling/stapled with another amino acid residue comprising an olefin group to form a staple through one of the two olefin groups and/or with another amino acid residue comprising an olefin group to form a staple through the other of the two olefin groups
  SITE 6: note = (S)-3-(2-amino-2-carboxyethyl)benzoic acid
  SITE 7: note = 2-amino-2-methylpropanoic acid
  SITE 10: note = Cysteine, sulfur bonded to position 1 of propane, useful for stapling/stapled with another thiol through position 3 of propane
  SITE 11: note (S)-3-amino-1-((pent-4-en-1-yloxy)carbonyl)pyrrolidine-3-ca rboxylic acid, useful for stapling/stapled with another amino acid residue comprising an olefin group to form a staple through the olefin group
  SITE 12: note = (S)-2-amino-3-(thiophen-3-yl)propanoic acid
  SITE 13: note = (S)-2-amino-3-(benzo[b]thiophen-3-yl)propanoic acid
  SITE 14: note = (R)-2-amino-3-mercapto-2-methylpropanoic acid, useful for stapling/stapled with another amino acid residue to form a staple through the thiol group
  SITE 15: note = C-term amino
XDXXDXXAFCXXXXA

SEQ ID NO: 1033 - protein, 15 aa, synthetic construct
  SITE 1: note = N-term Acetic Acid
  SITE 1: note = (R)-2-allylpyrrolidine-2-carboxylic acid, useful for stapling/stapled with another amino acid residue comprising an olefin group to form a staple through the olefin group
  SITE 3: note = (S)-2-amino-4,4-dimethylpentanoic acid
  VARIANT 4: note = 2-amino-2-(pent-4-en-1-yl)hept-6-enoic acid, useful for stapling/stapled with another amino acid residue comprising an olefin group to form a staple through one of the two olefin groups and/or with another amino acid residue comprising an olefin group to form a staple through the other of the two olefin groups
  SITE 6: note = (S)-3-(2-amino-2-carboxyethyl)benzoic acid
  SITE 7: note = 2-amino-2-methylpropanoic acid
  SITE 10: note = Cysteine, sulfur bonded to position 1 of but-2-ene, useful for stapling/stapled with another thiol through position 4 of but-2-ene
  SITE 11: note (S)-3-amino-1-((pent-4-en-1-yloxy)carbonyl)pyrrolidine-3-ca rboxylic acid, useful for stapling/stapled with another amino acid residue comprising an olefin group to form a staple through the olefin group
  SITE 12: note = (S)-2-amino-3-(thiophen-3-yl)propanoic acid
  SITE 13: note = (S)-2-amino-3-(benzo[b]thiophen-3-yl)propanoic acid
  SITE 14: note = (R)-2-amino-3-mercapto-2-methylpropanoic acid, useful for stapling/stapled with another amino acid residue to form a staple through the thiol group
  SITE 15: note = C-term amino
XDXXDXXAFCXXXXA

SEQ ID NO: 1034 - protein, 15 aa, synthetic construct
  SITE 1: note = N-term Acetic Acid
  SITE 1: note = (R)-2-allylpyrrolidine-2-carboxylic acid, useful for stapling/stapled with another amino acid residue comprising an olefin group to form a staple through the olefin group
  SITE 3: note = (S)-2-amino-4,4-dimethylpentanoic acid
  VARIANT 4: note = 2-amino-2-(pent-4-en-1-yl)hept-6-enoic acid, useful for stapling/stapled with another amino acid residue comprising an olefin group to form a staple through one of the two olefin groups and/or with another amino acid residue comprising an olefin group to form a staple through the other of the two olefin groups
  SITE 6: note = (S)-3-(2-amino-2-carboxyethyl)benzoic acid
  SITE 7: note = 2-amino-2-methylpropanoic acid
  SITE 10: note = Cysteine, sulfur bonded to the methyl at position 1 of 1,3,5-trimethylbenzene, useful for stapling/stapled with another thiol through the methyl at position 3 of 1,3,5-trimethylbenzene
  SITE 11: note (S)-3-amino-1-((pent-4-en-1-yloxy)carbonyl)pyrrolidine-3-ca rboxylic acid, useful for stapling/stapled with another amino acid residue comprising an olefin group to form a staple through the olefin group
  SITE 12: note = (S)-2-amino-3-(thiophen-3-yl)propanoic acid
  SITE 13: note = (S)-2-amino-3-(benzo[b]thiophen-3-yl)propanoic acid
  SITE 14: note = (R)-2-amino-3-mercapto-2-methylpropanoic acid, useful for stapling/stapled with another amino acid residue to form a staple through the thiol group
  SITE 15: note = C-term amino
XDXXDXXAFCXXXXA

SEQ ID NO: 1035 - protein, 15 aa, synthetic construct
  SITE 1: note = N-term Acetic Acid
  SITE 1: note = (R)-2-allylpyrrolidine-2-carboxylic acid, useful for stapling/stapled with another amino acid residue comprising an olefin group to form a staple through the olefin group
  SITE 3: note = (S)-2-amino-4,4-dimethylpentanoic acid
  VARIANT 4: note = 2-amino-2-(pent-4-en-1-yl)hept-6-enoic acid, useful for stapling/stapled with another amino acid residue comprising an olefin group to form a staple through one of the two olefin groups and/or with another amino acid residue comprising an olefin group to form a staple through the other of the two olefin groups
  SITE 6: note = (S)-3-(2-amino-2-carboxyethyl)benzoic acid
  SITE 7: note = 2-amino-2-methylpropanoic acid
  SITE 10: note = Cysteine, sulfur bonded to a methyl at position 3 of bis(methyl)oxetane, useful for stapling/stapled with another thiol through the other methyl at position 3 of bis(methyl)oxetane
  SITE 11: note (S)-3-amino-1-((pent-4-en-1-yloxy)carbonyl)pyrrolidine-3-ca rboxylic acid, useful for stapling/stapled with another amino acid residue comprising an olefin group to form a staple through the olefin group
  SITE 12: note = (S)-2-amino-3-(thiophen-3-yl)propanoic acid
  SITE 13: note = (S)-2-amino-3-(benzo[b]thiophen-3-yl)propanoic acid
  SITE 14: note = (R)-2-amino-3-mercapto-2-methylpropanoic acid, useful for stapling/stapled with another amino acid residue to form a staple through the thiol group
  SITE 15: note = C-term amino
XDXXDXXAFCXXXXA

SEQ ID NO: 1036 - protein, 17 aa, synthetic construct
  SITE 1: note = N-term Acetic Acid
  SITE 1: note = (R)-2-allylpyrrolidine-2-carboxylic acid, useful for stapling/stapled with another amino acid residue comprising an olefin group to form a staple through the olefin group
  SITE 3: note = (S)-2-amino-4,4-dimethylpentanoic acid
  VARIANT 4: note = 2-amino-2-(pent-4-en-1-yl)hept-6-enoic acid, useful for stapling/stapled with another amino acid residue comprising an olefin group to form a staple through one of the two olefin groups and/or with another amino acid residue comprising an olefin group to form a staple through the other of the two olefin groups
  SITE 6: note = (S)-3-(2-amino-2-carboxyethyl)benzoic acid
  SITE 7: note = 2-amino-2-methylpropanoic acid
  SITE 10: note = L-lysine, useful for stapling/stapled with another amino acid residue comprising a side chain acid group to form a staple through the 6-amino group
  SITE 11: note (S)-3-amino-1-((pent-4-en-1-yloxy)carbonyl)pyrrolidine-3-ca rboxylic acid, useful for stapling/stapled with another amino acid residue comprising an olefin group to form a staple through the olefin group
  SITE 12: note = (S)-2-amino-3-(thiophen-3-yl)propanoic acid
  SITE 13: note = (S)-2-amino-3-(benzo[b]thiophen-3-yl)propanoic acid
  SITE 14: note = L-glutamic acid, useful for stapling/stapled with another amino acid residue comprising a side chain amino group to form a staple through the 4-carboxyl group
  SITE 17: note = N6-acetyl-L-lysine
  SITE 17: note = C-term amino
XDXXDXXAFKXXXEAAK

SEQ ID NO: 1037 - protein, 17 aa, synthetic construct
  SITE 1: note = N-term Acetic Acid
  SITE 1: note = (R)-2-allylpyrrolidine-2-carboxylic acid, useful for stapling/stapled with another amino acid residue comprising an olefin group to form a staple through the olefin group
  VARIANT 4: note = 2-amino-2-(pent-4-en-1-yl)hept-6-enoic acid, useful for stapling/stapled with another amino acid residue comprising an olefin group to form a staple through one of the two olefin groups and/or with another amino acid residue comprising an olefin group to form a staple through the other of the two olefin groups
  SITE 6: note = (S)-3-(2-amino-2-carboxyethyl)benzoic acid
  SITE 7: note = 2-amino-2-methylpropanoic acid
  SITE 10: note = L-lysine, useful for stapling/stapled with another amino acid residue comprising a side chain acid group to form a staple through the 6-amino group
  SITE 11: note (S)-3-amino-1-((pent-4-en-1-yloxy)carbonyl)pyrrolidine-3-ca rboxylic acid, useful for stapling/stapled with another amino acid residue comprising an olefin group to form a staple through the olefin group
  SITE 13: note = (S)-2-amino-3-(3,4-dichlorophenyl)propanoic acid
  SITE 14: note = L-glutamic acid, useful for stapling/stapled with another amino acid residue comprising a side chain amino group to form a staple through the 4-carboxyl group
  SITE 17: note = N6-acetyl-L-lysine
  SITE 17: note = C-term amino
XDIXDXXAFKXFXEAAK

SEQ ID NO: 1038 - protein, 18 aa, synthetic construct
  SITE 1: note = N-term Acetic Acid
  SITE 1: note = (R)-2-allylpyrrolidine-2-carboxylic acid, useful for stapling/stapled with another amino acid residue comprising an olefin group to form a staple through the olefin group
  SITE 3: note = (S)-2-amino-4,4-dimethylpentanoic acid
  VARIANT 4: note = 2-amino-2-(pent-4-en-1-yl)hept-6-enoic acid, useful for stapling/stapled with another amino acid residue comprising an olefin group to form a staple through one of the two olefin groups and/or with another amino acid residue comprising an olefin group to form a staple through the other of the two olefin groups
  SITE 6: note = (S)-3-(2-amino-2-carboxyethyl)benzoic acid
  SITE 7: note = 2-amino-2-methylpropanoic acid
  SITE 10: note = L-lysine, useful for stapling/stapled with another amino acid residue comprising a side chain acid group to form a staple through the 6-amino group
  SITE 11: note (S)-3-amino-1-((pent-4-en-1-yloxy)carbonyl)pyrrolidine-3-ca rboxylic acid, useful for stapling/stapled with another amino acid residue comprising an olefin group to form a staple through the olefin group
  SITE 12: note = (S)-2-amino-3-(thiophen-3-yl)propanoic acid
  SITE 13: note = (S)-2-amino-3-(benzo[b]thiophen-3-yl)propanoic acid
  SITE 14: note = L-glutamic acid, useful for stapling/stapled with another amino acid residue comprising a side chain amino group to form a staple through the 4-carboxyl group
  SITE 18: note = N6-acetyl-L-lysine
  SITE 18: note = C-term amino
XDXXDXXAFKXXXEAAAK

SEQ ID NO: 1039 - protein, 18 aa, synthetic construct
  SITE 1: note = N-term Acetic Acid
  SITE 1: note = (R)-2-allylpyrrolidine-2-carboxylic acid, useful for stapling/stapled with another amino acid residue comprising an olefin group to form a staple through the olefin group
  VARIANT 4: note = 2-amino-2-(pent-4-en-1-yl)hept-6-enoic acid, useful for stapling/stapled with another amino acid residue comprising an olefin group to form a staple through one of the two olefin groups and/or with another amino acid residue comprising an olefin group to form a staple through the other of the two olefin groups
  SITE 6: note = (S)-3-(2-amino-2-carboxyethyl)benzoic acid
  SITE 7: note = 2-amino-2-methylpropanoic acid
  SITE 10: note = L-lysine, useful for stapling/stapled with another amino acid residue comprising a side chain acid group to form a staple through the 6-amino group
  SITE 11: note (S)-3-amino-1-((pent-4-en-1-yloxy)carbonyl)pyrrolidine-3-ca rboxylic acid, useful for stapling/stapled with another amino acid residue comprising an olefin group to form a staple through the olefin group
  SITE 13: note = (S)-2-amino-3-(3,4-dichlorophenyl)propanoic acid
  SITE 14: note = L-glutamic acid, useful for stapling/stapled with another amino acid residue comprising a side chain amino group to form a staple through the 4-carboxyl group
  SITE 18: note = N6-acetyl-L-lysine
  SITE 18: note = C-term amino
XDIXDXXAFKXFXEAAAK

SEQ ID NO: 1040 - protein, 15 aa, synthetic construct
  SITE 1: note = N-term Acetic Acid
  SITE 1: note = (R)-2-allylpyrrolidine-2-carboxylic acid, useful for stapling/stapled with another amino acid residue comprising an olefin group to form a staple through the olefin group
  SITE 3: note = (S)-2-amino-4,4-dimethylpentanoic acid
  VARIANT 4: note = 2-amino-2-(pent-4-en-1-yl)hept-6-enoic acid, useful for stapling/stapled with another amino acid residue comprising an olefin group to form a staple through one of the two olefin groups and/or with another amino acid residue comprising an olefin group to form a staple through the other of the two olefin groups
  SITE 6: note = (S)-3-acetamido-2-aminopropanoic acid
  SITE 7: note = 2-amino-2-methylpropanoic acid
  SITE 10: note = L-lysine, useful for stapling/stapled with another amino acid residue comprising a side chain acid group to form a staple through the 6-amino group
  SITE 11: note (S)-3-amino-1-((pent-4-en-1-yloxy)carbonyl)pyrrolidine-3-ca rboxylic acid, useful for stapling/stapled with another amino acid residue comprising an olefin group to form a staple through the olefin group
  SITE 12: note = (S)-2-amino-3-(thiophen-3-yl)propanoic acid
  SITE 13: note = (S)-2-amino-3-(benzo[b]thiophen-3-yl)propanoic acid
  SITE 14: note = L-glutamic acid, useful for stapling/stapled with another amino acid residue comprising a side chain amino group to form a staple through the 4-carboxyl group
  SITE 15: note = C-term amino
XDXXDXXAFKXXXEA

SEQ ID NO: 1041 - protein, 15 aa, synthetic construct
  SITE 1: note = N-term Acetic Acid
  SITE 1: note = (R)-2-allylpyrrolidine-2-carboxylic acid, useful for stapling/stapled with another amino acid residue comprising an olefin group to form a staple through the olefin group
  SITE 3: note = (S)-2-amino-4,4-dimethylpentanoic acid
  VARIANT 4: note = 2-amino-2-(pent-4-en-1-yl)hept-6-enoic acid, useful for stapling/stapled with another amino acid residue comprising an olefin group to form a staple through one of the two olefin groups and/or with another amino acid residue comprising an olefin group to form a staple through the other of the two olefin groups
  SITE 6: note = 4-amino-1-(carboxymethyl)piperidine-4-carboxylic acid
  SITE 7: note = 2-amino-2-methylpropanoic acid
  SITE 10: note = L-lysine, useful for stapling/stapled with another amino acid residue comprising a side chain acid group to form a staple through the 6-amino group
  SITE 11: note (S)-3-amino-1-((pent-4-en-1-yloxy)carbonyl)pyrrolidine-3-ca rboxylic acid, useful for stapling/stapled with another amino acid residue comprising an olefin group to form a staple through the olefin group
  SITE 12: note = (S)-2-amino-3-(thiophen-3-yl)propanoic acid
  SITE 13: note = (S)-2-amino-3-(benzo[b]thiophen-3-yl)propanoic acid
  SITE 14: note = L-glutamic acid, useful for stapling/stapled with another amino acid residue comprising a side chain amino group to form a staple through the 4-carboxyl group
  SITE 15: note = C-term amino
XDXXDXXAFKXXXEA

SEQ ID NO: 1042 - protein, 15 aa, synthetic construct
  SITE 1: note = N-term Acetic Acid
  SITE 1: note = (R)-2-allylpyrrolidine-2-carboxylic acid, useful for stapling/stapled with another amino acid residue comprising an olefin group to form a staple through the olefin group
  SITE 3: note = (S)-2-amino-4,4-dimethylpentanoic acid
  VARIANT 4: note = 2-amino-2-(pent-4-en-1-yl)hept-6-enoic acid, useful for stapling/stapled with another amino acid residue comprising an olefin group to form a staple through one of the two olefin groups and/or with another amino acid residue comprising an olefin group to form a staple through the other of the two olefin groups
  SITE 6: note (S)-2-amino-3-((carboxymethyl)((perfluorophenyl)methyl)amin o) propanoic acid
  SITE 7: note = 2-amino-2-methylpropanoic acid
  SITE 10: note = L-lysine, useful for stapling/stapled with another amino acid residue comprising a side chain acid group to form a staple through the 6-amino group
  SITE 11: note (S)-3-amino-1-((pent-4-en-1-yloxy)carbonyl)pyrrolidine-3-ca rboxylic acid, useful for stapling/stapled with another amino acid residue comprising an olefin group to form a staple through the olefin group
  SITE 12: note = (S)-2-amino-3-(thiophen-3-yl)propanoic acid
  SITE 13: note = (S)-2-amino-3-(benzo[b]thiophen-3-yl)propanoic acid
  SITE 14: note = L-glutamic acid, useful for stapling/stapled with another amino acid residue comprising a side chain amino group to form a staple through the 4-carboxyl group
  SITE 15: note = C-term amino
XDXXDXXAFKXXXEA

SEQ ID NO: 1043 - protein, 15 aa, synthetic construct
  SITE 1: note = N-term Acetic Acid
  SITE 1: note = (R)-2-allylpyrrolidine-2-carboxylic acid, useful for stapling/stapled with another amino acid residue comprising an olefin group to form a staple through the olefin group
  SITE 3: note = (S)-2-amino-4,4-dimethylpentanoic acid
  VARIANT 4: note = 2-amino-2-(pent-4-en-1-yl)hept-6-enoic acid, useful for stapling/stapled with another amino acid residue comprising an olefin group to form a staple through one of the two olefin groups and/or with another amino acid residue comprising an olefin group to form a staple through the other of the two olefin groups
  SITE 6: note (S)-2-amino-3-((carboxymethyl)(4,4,4-trifluorobutyl)amino) propanoic acid
  SITE 7: note = 2-amino-2-methylpropanoic acid
  SITE 10: note = L-lysine, useful for stapling/stapled with another amino acid residue comprising a side chain acid group to form a staple through the 6-amino group
  SITE 11: note (S)-3-amino-1-((pent-4-en-1-yloxy)carbonyl)pyrrolidine-3-ca rboxylic acid, useful for stapling/stapled with another amino acid residue comprising an olefin group to form a staple through the olefin group
  SITE 12: note = (S)-2-amino-3-(thiophen-3-yl)propanoic acid
  SITE 13: note = (S)-2-amino-3-(benzo[b]thiophen-3-yl)propanoic acid
  SITE 14: note = L-glutamic acid, useful for stapling/stapled with another amino acid residue comprising a side chain amino group to form a staple through the 4-carboxyl group
  SITE 15: note = C-term amino
XDXXDXXAFKXXXEA

SEQ ID NO: 1044 - protein, 15 aa, synthetic construct
  SITE 1: note = N-term Acetic Acid
  SITE 1: note = (R)-2-allylpyrrolidine-2-carboxylic acid, useful for stapling/stapled with another amino acid residue comprising an olefin group to form a staple through the olefin group
  SITE 3: note = (S)-2-amino-4,4-dimethylpentanoic acid
  VARIANT 4: note = 2-amino-2-(pent-4-en-1-yl)hept-6-enoic acid, useful for stapling/stapled with another amino acid residue comprising an olefin group to form a staple through one of the two olefin groups and/or with another amino acid residue comprising an olefin group to form a staple through the other of the two olefin groups
  SITE 6: note = (S)-3-(2-amino-2-carboxyethyl)benzoic acid
  SITE 7: note = 2-amino-2-methylpropanoic acid
  SITE 10: note = L-lysine, useful for stapling/stapled with another amino acid residue comprising a side chain acid group to form a staple through the 6-amino group
  SITE 11: note (S)-3-amino-1-((pent-4-en-1-yloxy)carbonyl)pyrrolidine-3-ca rboxylic acid, useful for stapling/stapled with another amino acid residue comprising an olefin group to form a staple through the olefin group
  SITE 12: note = (S)-2-amino-3-(thiophen-3-yl)propanoic acid
  SITE 13: note = (S)-2-amino-3-(benzo[b]thiophen-3-yl)propanoic acid
  SITE 14: note = L-glutamic acid, useful for stapling/stapled with another amino acid residue comprising a side chain amino group to form a staple through the 4-carboxyl group
  SITE 15: note = C-term methanamine
XDXXDXXAFKXXXEA

SEQ ID NO: 1045 - protein, 17 aa, synthetic construct
  SITE 1: note = N-term Acetic Acid
  SITE 1: note = (R)-2-allylpyrrolidine-2-carboxylic acid, useful for stapling/stapled with another amino acid residue comprising an olefin group to form a staple through the olefin group
  SITE 3: note = (S)-2-amino-4,4-dimethylpentanoic acid
  VARIANT 4: note = 2-amino-2-(pent-4-en-1-yl)hept-6-enoic acid, useful for stapling/stapled with another amino acid residue comprising an olefin group to form a staple through one of the two olefin groups and/or with another amino acid residue comprising an olefin group to form a staple through the other of the two olefin groups
  SITE 6: note = (S)-3-(2-amino-2-carboxyethyl)benzoic acid
  SITE 7: note = 2-amino-2-methylpropanoic acid
  SITE 10: note = L-lysine, useful for stapling/stapled with another amino acid residue comprising a side chain acid group to form a staple through the 6-amino group
  SITE 11: note (S)-3-amino-1-((pent-4-en-1-yloxy)carbonyl)pyrrolidine-3-ca rboxylic acid, useful for stapling/stapled with another amino acid residue comprising an olefin group to form a staple through the olefin group
  SITE 12: note = (S)-2-amino-3-(thiophen-3-yl)propanoic acid
  SITE 13: note = (S)-2-amino-3-(benzo[b]thiophen-3-yl)propanoic acid
  SITE 14: note = L-glutamic acid, useful for stapling/stapled with another amino acid residue comprising a side chain amino group to form a staple through the 4-carboxyl group
  SITE 17: note (S)-20-amino-14-oxo-2,5,8,11-tetraoxa-15-azahenicosan-21-oi c acid
  SITE 17: note = C-term amino
XDXXDXXAFKXXXEAAX

SEQ ID NO: 1046 - protein, 17 aa, synthetic construct
  SITE 1: note = N-term Acetic Acid
  SITE 1: note = (R)-2-allylpyrrolidine-2-carboxylic acid, useful for stapling/stapled with another amino acid residue comprising an olefin group to form a staple through the olefin group
  SITE 3: note = (S)-2-amino-4,4-dimethylpentanoic acid
  VARIANT 4: note = 2-amino-2-(pent-4-en-1-yl)hept-6-enoic acid, useful for stapling/stapled with another amino acid residue comprising an olefin group to form a staple through one of the two olefin groups and/or with another amino acid residue comprising an olefin group to form a staple through the other of the two olefin groups
  SITE 6: note = (S)-3-(2-amino-2-carboxyethyl)benzoic acid
  SITE 7: note = 2-amino-2-methylpropanoic acid
  SITE 10: note = L-lysine, useful for stapling/stapled with another amino acid residue comprising a side chain acid group to form a staple through the 6-amino group
  SITE 11: note (S)-3-amino-1-((pent-4-en-1-yloxy)carbonyl)pyrrolidine-3-ca rboxylic acid, useful for stapling/stapled with another amino acid residue comprising an olefin group to form a staple through the olefin group
  SITE 12: note = (S)-2-amino-3-(thiophen-3-yl)propanoic acid
  SITE 13: note = (S)-2-amino-3-(benzo[b]thiophen-3-yl)propanoic acid
  SITE 14: note = L-glutamic acid, useful for stapling/stapled with another amino acid residue comprising a side chain amino group to form a staple through the 4-carboxyl group
  SITE 17: note = (S)-32-amino-26-oxo-2,5,8,11,14,17,20,23-octaoxa-27- azatritriacontan-33-oic acid
  SITE 17: note = C-term amino
XDXXDXXAFKXXXEAAX

SEQ ID NO: 1047 - protein, 17 aa, synthetic construct
  SITE 1: note = N-term Acetic Acid
  SITE 1: note = (R)-2-allylpyrrolidine-2-carboxylic acid, useful for stapling/stapled with another amino acid residue comprising an olefin group to form a staple through the olefin group
  SITE 3: note = (S)-2-amino-4,4-dimethylpentanoic acid
  VARIANT 4: note = 2-amino-2-(pent-4-en-1-yl)hept-6-enoic acid, useful for stapling/stapled with another amino acid residue comprising an olefin group to form a staple through one of the two olefin groups and/or with another amino acid residue comprising an olefin group to form a staple through the other of the two olefin groups
  SITE 6: note = (S)-3-(2-amino-2-carboxyethyl)benzoic acid
  SITE 7: note = 2-amino-2-methylpropanoic acid
  SITE 10: note = L-lysine, useful for stapling/stapled with another amino acid residue comprising a side chain acid group to form a staple through the 6-amino group
  SITE 11: note (S)-3-amino-1-((pent-4-en-1-yloxy)carbonyl)pyrrolidine-3-ca rboxylic acid, useful for stapling/stapled with another amino acid residue comprising an olefin group to form a staple through the olefin group
  SITE 12: note = (S)-2-amino-3-(thiophen-3-yl)propanoic acid
  SITE 13: note = (S)-2-amino-3-(benzo[b]thiophen-3-yl)propanoic acid
  SITE 14: note = L-glutamic acid, useful for stapling/stapled with another amino acid residue comprising a side chain amino group to form a staple through the 4-carboxyl group
  SITE 17: note (S)-56-amino-50-oxo-2,5,8,11,14,17,20,23,26,29,32,35,38,41, 44, 47-hexadecaoxa-51-azaheptapentacontan-57-oic acid
  SITE 17: note = C-term amino
XDXXDXXAFKXXXEAAX

SEQ ID NO: 1048 - protein, 17 aa, synthetic construct
  SITE 1: note = N-term Acetic Acid
  SITE 1: note = (R)-2-allylpyrrolidine-2-carboxylic acid, useful for stapling/stapled with another amino acid residue comprising an olefin group to form a staple through the olefin group
  VARIANT 4: note = 2-amino-2-(pent-4-en-1-yl)hept-6-enoic acid, useful for stapling/stapled with another amino acid residue comprising an olefin group to form a staple through one of the two olefin groups and/or with another amino acid residue comprising an olefin group to form a staple through the other of the two olefin groups
  SITE 6: note = (S)-3-(2-amino-2-carboxyethyl)benzoic acid
  SITE 7: note = 2-amino-2-methylpropanoic acid
  SITE 10: note = L-lysine, useful for stapling/stapled with another amino acid residue comprising a side chain acid group to form a staple through the 6-amino group
  SITE 11: note (S)-3-amino-1-((pent-4-en-1-yloxy)carbonyl)pyrrolidine-3-ca rboxylic acid, useful for stapling/stapled with another amino acid residue comprising an olefin group to form a staple through the olefin group
  SITE 13: note = (S)-2-amino-3-(3,4-dichlorophenyl)propanoic acid
  SITE 14: note = L-glutamic acid, useful for stapling/stapled with another amino acid residue comprising a side chain amino group to form a staple through the 4-carboxyl group
  SITE 17: note (S)-20-amino-14-oxo-2,5,8,11-tetraoxa-15-azahenicosan-21-oi c acid
  SITE 17: note = C-term amino
XDIXDXXAFKXFXEAAX

SEQ ID NO: 1049 - protein, 17 aa, synthetic construct
  SITE 1: note = N-term Acetic Acid
  SITE 1: note = (R)-2-allylpyrrolidine-2-carboxylic acid, useful for stapling/stapled with another amino acid residue comprising an olefin group to form a staple through the olefin group
  VARIANT 4: note = 2-amino-2-(pent-4-en-1-yl)hept-6-enoic acid, useful for stapling/stapled with another amino acid residue comprising an olefin group to form a staple through one of the two olefin groups and/or with another amino acid residue comprising an olefin group to form a staple through the other of the two olefin groups
  SITE 6: note = (S)-3-(2-amino-2-carboxyethyl)benzoic acid
  SITE 7: note = 2-amino-2-methylpropanoic acid
  SITE 10: note = L-lysine, useful for stapling/stapled with another amino acid residue comprising a side chain acid group to form a staple through the 6-amino group
  SITE 11: note (S)-3-amino-1-((pent-4-en-1-yloxy)carbonyl)pyrrolidine-3-ca rboxylic acid, useful for stapling/stapled with another amino acid residue comprising an olefin group to form a staple through the olefin group
  SITE 13: note = (S)-2-amino-3-(3,4-dichlorophenyl)propanoic acid
  SITE 14: note = L-glutamic acid, useful for stapling/stapled with another amino acid residue comprising a side chain amino group to form a staple through the 4-carboxyl group
  SITE 17: note = (S)-32-amino-26-oxo-2,5,8,11,14,17,20,23-octaoxa-27- azatritriacontan-33-oic acid
  SITE 17: note = C-term amino
XDIXDXXAFKXFXEAAX

SEQ ID NO: 1050 - protein, 17 aa, synthetic construct
  SITE 1: note = N-term Acetic Acid
  SITE 1: note = (R)-2-allylpyrrolidine-2-carboxylic acid, useful for stapling/stapled with another amino acid residue comprising an olefin group to form a staple through the olefin group
  VARIANT 4: note = 2-amino-2-(pent-4-en-1-yl)hept-6-enoic acid, useful for stapling/stapled with another amino acid residue comprising an olefin group to form a staple through one of the two olefin groups and/or with another amino acid residue comprising an olefin group to form a staple through the other of the two olefin groups
  SITE 6: note = (S)-3-(2-amino-2-carboxyethyl)benzoic acid
  SITE 7: note = 2-amino-2-methylpropanoic acid
  SITE 10: note = L-lysine, useful for stapling/stapled with another amino acid residue comprising a side chain acid group to form a staple through the 6-amino group
  SITE 11: note (S)-3-amino-1-((pent-4-en-1-yloxy)carbonyl)pyrrolidine-3-ca rboxylic acid, useful for stapling/stapled with another amino acid residue comprising an olefin group to form a staple through the olefin group
  SITE 13: note = (S)-2-amino-3-(3,4-dichlorophenyl)propanoic acid
  SITE 14: note = L-glutamic acid, useful for stapling/stapled with another amino acid residue comprising a side chain amino group to form a staple through the 4-carboxyl group
  SITE 17: note (S)-56-amino-50-oxo-2,5,8,11,14,17,20,23,26,29,32,35,38,41, 44,47 -hexadecaoxa-51-azaheptapentacontan-57-oic acid
  SITE 17: note = C-term amino
XDIXDXXAFKXFXEAAX

SEQ ID NO: 1051 - protein, 18 aa, synthetic construct
  SITE 1: note = N-term Acetic Acid
  SITE 1: note = (R)-2-allylpyrrolidine-2-carboxylic acid, useful for stapling/stapled with another amino acid residue comprising an olefin group to form a staple through the olefin group
  SITE 3: note = (S)-2-amino-4,4-dimethylpentanoic acid
  VARIANT 4: note = 2-amino-2-(pent-4-en-1-yl)hept-6-enoic acid, useful for stapling/stapled with another amino acid residue comprising an olefin group to form a staple through one of the two olefin groups and/or with another amino acid residue comprising an olefin group to form a staple through the other of the two olefin groups
  SITE 6: note = (S)-3-(2-amino-2-carboxyethyl)benzoic acid
  SITE 7: note = 2-amino-2-methylpropanoic acid
  SITE 10: note = L-lysine, useful for stapling/stapled with another amino acid residue comprising a side chain acid group to form a staple through the 6-amino group
  SITE 11: note (S)-3-amino-1-((pent-4-en-1-yloxy)carbonyl)pyrrolidine-3-ca rboxylic acid, useful for stapling/stapled with another amino acid residue comprising an olefin group to form a staple through the olefin group
  SITE 12: note = (S)-2-amino-3-(thiophen-3-yl)propanoic acid
  SITE 13: note = (S)-2-amino-3-(benzo[b]thiophen-3-yl)propanoic acid
  SITE 14: note = L-glutamic acid, useful for stapling/stapled with another amino acid residue comprising a side chain amino group to form a staple through the 4-carboxyl group
  SITE 18: note = (S)-32-amino-26-oxo-2,5,8,11,14,17,20,23-octaoxa-27- azatritriacontan-33-oic acid
  SITE 18: note = C-term amino
XDXXDXXAFKXXXEAAAX

SEQ ID NO: 1052 - protein, 18 aa, synthetic construct
  SITE 1: note = N-term Acetic Acid
  SITE 1: note = (R)-2-allylpyrrolidine-2-carboxylic acid, useful for stapling/stapled with another amino acid residue comprising an olefin group to form a staple through the olefin group
  SITE 3: note = (S)-2-amino-4,4-dimethylpentanoic acid
  VARIANT 4: note = 2-amino-2-(pent-4-en-1-yl)hept-6-enoic acid, useful for stapling/stapled with another amino acid residue comprising an olefin group to form a staple through one of the two olefin groups and/or with another amino acid residue comprising an olefin group to form a staple through the other of the two olefin groups
  SITE 6: note = (S)-3-(2-amino-2-carboxyethyl)benzoic acid
  SITE 7: note = 2-amino-2-methylpropanoic acid
  SITE 10: note = L-lysine, useful for stapling/stapled with another amino acid residue comprising a side chain acid group to form a staple through the 6-amino group
  SITE 11: note (S)-3-amino-1-((pent-4-en-1-yloxy)carbonyl)pyrrolidine-3-ca rboxylic acid, useful for stapling/stapled with another amino acid residue comprising an olefin group to form a staple through the olefin group
  SITE 12: note = (S)-2-amino-3-(thiophen-3-yl)propanoic acid
  SITE 13: note = (S)-2-amino-3-(benzo[b]thiophen-3-yl)propanoic acid
  SITE 14: note = L-glutamic acid, useful for stapling/stapled with another amino acid residue comprising a side chain amino group to form a staple through the 4-carboxyl group
  SITE 18: note (S)-56-amino-50-oxo-2,5,8,11,14,17,20,23,26,29,32,35,38,41, 44, 47-hexadecaoxa-51-azaheptapentacontan-57-oic acid
  SITE 18: note = C-term amino
XDXXDXXAFKXXXEAAAX

SEQ ID NO: 1053 - protein, 18 aa, synthetic construct
  SITE 1: note = N-term Acetic Acid
  SITE 1: note = (R)-2-allylpyrrolidine-2-carboxylic acid, useful for stapling/stapled with another amino acid residue comprising an olefin group to form a staple through the olefin group
  SITE 3: note = (S)-2-amino-4,4-dimethylpentanoic acid
  VARIANT 4: note = 2-amino-2-(pent-4-en-1-yl)hept-6-enoic acid, useful for stapling/stapled with another amino acid residue comprising an olefin group to form a staple through one of the two olefin groups and/or with another amino acid residue comprising an olefin group to form a staple through the other of the two olefin groups
  SITE 6: note = (S)-3-(2-amino-2-carboxyethyl)benzoic acid
  SITE 7: note = 2-amino-2-methylpropanoic acid
  SITE 10: note = L-lysine, useful for stapling/stapled with another amino acid residue comprising a side chain acid group to form a staple through the 6-amino group
  SITE 11: note (S)-3-amino-1-((pent-4-en-1-yloxy)carbonyl)pyrrolidine-3-ca rboxylic acid, useful for stapling/stapled with another amino acid residue comprising an olefin group to form a staple through the olefin group
  SITE 12: note = (S)-2-amino-3-(thiophen-3-yl)propanoic acid
  SITE 13: note = (S)-2-amino-3-(benzo[b]thiophen-3-yl)propanoic acid
  SITE 14: note = L-glutamic acid, useful for stapling/stapled with another amino acid residue comprising a side chain amino group to form a staple through the 4-carboxyl group
  SITE 18: note (S)-119-amino-113-oxo-2,5,8,11,14,17,20,23,26,29,32,35,38,4 1,44, 47,50,53,56,59,62,65,68,71,74,77,80,83,86,89,92,95,98,101,1 04, 107,110-heptatriacontaoxa-114-azaicosahectan-120-oic acid
  SITE 18: note = C-term amino
XDXXDXXAFKXXXEAAAX

SEQ ID NO: 1054 - protein, 18 aa, synthetic construct
  SITE 1: note = N-term Acetic Acid
  SITE 1: note = (R)-2-allylpyrrolidine-2-carboxylic acid, useful for stapling/stapled with another amino acid residue comprising an olefin group to form a staple through the olefin group
  VARIANT 4: note = 2-amino-2-(pent-4-en-1-yl)hept-6-enoic acid, useful for stapling/stapled with another amino acid residue comprising an olefin group to form a staple through one of the two olefin groups and/or with another amino acid residue comprising an olefin group to form a staple through the other of the two olefin groups
  SITE 6: note = (S)-3-(2-amino-2-carboxyethyl)benzoic acid
  SITE 7: note = 2-amino-2-methylpropanoic acid
  SITE 10: note = L-lysine, useful for stapling/stapled with another amino acid residue comprising a side chain acid group to form a staple through the 6-amino group
  SITE 11: note (S)-3-amino-1-((pent-4-en-1-yloxy)carbonyl)pyrrolidine-3-ca rboxylic acid, useful for stapling/stapled with another amino acid residue comprising an olefin group to form a staple through the olefin group
  SITE 13: note = (S)-2-amino-3-(3,4-dichlorophenyl)propanoic acid
  SITE 14: note = L-glutamic acid, useful for stapling/stapled with another amino acid residue comprising a side chain amino group to form a staple through the 4-carboxyl group
  SITE 18: note (S)-20-amino-14-oxo-2,5,8,11-tetraoxa-15-azahenicosan-21-oi c acid
  SITE 18: note = C-term amino
XDIXDXXAFKXFXEAAAX

SEQ ID NO: 1055 - protein, 18 aa, synthetic construct
  SITE 1: note = N-term Acetic Acid
  SITE 1: note = (R)-2-allylpyrrolidine-2-carboxylic acid, useful for stapling/stapled with another amino acid residue comprising an olefin group to form a staple through the olefin group
  VARIANT 4: note = 2-amino-2-(pent-4-en-1-yl)hept-6-enoic acid, useful for stapling/stapled with another amino acid residue comprising an olefin group to form a staple through one of the two olefin groups and/or with another amino acid residue comprising an olefin group to form a staple through the other of the two olefin groups
  SITE 6: note = (S)-3-(2-amino-2-carboxyethyl)benzoic acid
  SITE 7: note = 2-amino-2-methylpropanoic acid
  SITE 10: note = L-lysine, useful for stapling/stapled with another amino acid residue comprising a side chain acid group to form a staple through the 6-amino group
  SITE 11: note (S)-3-amino-1-((pent-4-en-1-yloxy)carbonyl)pyrrolidine-3-ca rboxylic acid, useful for stapling/stapled with another amino acid residue comprising an olefin group to form a staple through the olefin group
  SITE 13: note = (S)-2-amino-3-(3,4-dichlorophenyl)propanoic acid
  SITE 14: note = L-glutamic acid, useful for stapling/stapled with another amino acid residue comprising a side chain amino group to form a staple through the 4-carboxyl group
  SITE 18: note = (S)-32-amino-26-oxo-2,5,8,11,14,17,20,23-octaoxa-27- azatritriacontan-33-oic acid
  SITE 18: note = C-term amino
XDIXDXXAFKXFXEAAAX

SEQ ID NO: 1056 - protein, 18 aa, synthetic construct
  SITE 1: note = N-term Acetic Acid
  SITE 1: note = (R)-2-allylpyrrolidine-2-carboxylic acid, useful for stapling/stapled with another amino acid residue comprising an olefin group to form a staple through the olefin group
  VARIANT 4: note = 2-amino-2-(pent-4-en-1-yl)hept-6-enoic acid, useful for stapling/stapled with another amino acid residue comprising an olefin group to form a staple through one of the two olefin groups and/or with another amino acid residue comprising an olefin group to form a staple through the other of the two olefin groups
  SITE 6: note = (S)-3-(2-amino-2-carboxyethyl)benzoic acid
  SITE 7: note = 2-amino-2-methylpropanoic acid
  SITE 10: note = L-lysine, useful for stapling/stapled with another amino acid residue comprising a side chain acid group to form a staple through the 6-amino group
  SITE 11: note (S)-3-amino-1-((pent-4-en-1-yloxy)carbonyl)pyrrolidine-3-ca rboxylic acid, useful for stapling/stapled with another amino acid residue comprising an olefin group to form a staple through the olefin group
  SITE 13: note = (S)-2-amino-3-(3,4-dichlorophenyl)propanoic acid
  SITE 14: note = L-glutamic acid, useful for stapling/stapled with another amino acid residue comprising a side chain amino group to form a staple through the 4-carboxyl group
  SITE 18: note (S)-56-amino-50-oxo-2,5,8,11,14,17,20,23,26,29,32,35,38,41, 44,47 -hexadecaoxa-51-azaheptapentacontan-57-oic acid
  SITE 18: note = C-term amino
XDIXDXXAFKXFXEAAAX

SEQ ID NO: 1057 - protein, 14 aa, synthetic construct
  SITE 1: note = N-term Acetic Acid
  SITE 1: note = (R)-2-allylpyrrolidine-2-carboxylic acid, useful for stapling/stapled with another amino acid residue comprising an olefin group to form a staple through the olefin group
  VARIANT 4: note = 2-amino-2-(pent-4-en-1-yl)hept-6-enoic acid, useful for stapling/stapled with another amino acid residue comprising an olefin group to form a staple through one of the two olefin groups and/or with another amino acid residue comprising an olefin group to form a staple through the other of the two olefin groups
  SITE 6: note = (S)-3-(2-amino-2-carboxyethyl)benzoic acid
  SITE 7: note = 2-amino-2-methylpropanoic acid
  SITE 10: note = L-glutamic acid, useful for stapling/stapled with another amino acid residue comprising a side chain amino group to form a staple through the 4-carboxyl group
  SITE 11: note (S)-3-amino-1-((pent-4-en-1-yloxy)carbonyl)pyrrolidine-3-ca rboxylic acid, useful for stapling/stapled with another amino acid residue comprising an olefin group to form a staple through the olefin group
  SITE 13: note = (S)-2-amino-3-(3,4-dichlorophenyl)propanoic acid
  SITE 14: note = N5-methyl-N5-(2-(methylamino)ethyl)-L-glutamine, useful for stapling/stapled with another amino acid residue comprising a side chain acid group to form a staple through the amino group in the side chain
  SITE 14: note = C-term amino
XDIXDXXAFEXFXQ

SEQ ID NO: 1058 - protein, 14 aa, synthetic construct
  SITE 1: note = N-term Acetic Acid
  SITE 1: note = (R)-2-allylpyrrolidine-2-carboxylic acid, useful for stapling/stapled with another amino acid residue comprising an olefin group to form a staple through the olefin group
  VARIANT 4: note = 2-amino-2-(pent-4-en-1-yl)hept-6-enoic acid, useful for stapling/stapled with another amino acid residue comprising an olefin group to form a staple through one of the two olefin groups and/or with another amino acid residue comprising an olefin group to form a staple through the other of the two olefin groups
  SITE 6: note = (S)-3-(2-amino-2-carboxyethyl)benzoic acid
  SITE 7: note = 2-amino-2-methylpropanoic acid
  SITE 10: note = L-glutamic acid, useful for stapling/stapled with another amino acid residue comprising a side chain amino group to form a staple through the 4-carboxyl group
  SITE 11: note (S)-3-amino-1-((pent-4-en-1-yloxy)carbonyl)pyrrolidine-3-ca rboxylic acid, useful for stapling/stapled with another amino acid residue comprising an olefin group to form a staple through the olefin group
  SITE 13: note = (S)-2-amino-3-(3,4-dichlorophenyl)propanoic acid
  SITE 14: note = N4-methyl-N4-(2-(methylamino)ethyl)-L-asparagine, useful for stapling/stapled with another amino acid residue comprising a side chain acid group to form a staple through the amino group in the side chain
  SITE 14: note = C-term amino
XDIXDXXAFEXFXN

SEQ ID NO: 1059 - protein, 14 aa, synthetic construct
  SITE 1: note = N-term Acetic Acid
  SITE 1: note = (R)-2-allylpyrrolidine-2-carboxylic acid, useful for stapling/stapled with another amino acid residue comprising an olefin group to form a staple through the olefin group
  VARIANT 4: note = 2-amino-2-(pent-4-en-1-yl)hept-6-enoic acid, useful for stapling/stapled with another amino acid residue comprising an olefin group to form a staple through one of the two olefin groups and/or with another amino acid residue comprising an olefin group to form a staple through the other of the two olefin groups
  SITE 6: note = (S)-3-(2-amino-2-carboxyethyl)benzoic acid
  SITE 7: note = 2-amino-2-methylpropanoic acid
  SITE 10: note = L-glutamic acid, useful for stapling/stapled with another amino acid residue comprising a side chain amino group to form a staple through the 4-carboxyl group
  SITE 11: note (S)-3-amino-1-((pent-4-en-1-yloxy)carbonyl)pyrrolidine-3-ca rboxylic acid, useful for stapling/stapled with another amino acid residue comprising an olefin group to form a staple through the olefin group
  SITE 13: note = (S)-2-amino-3-(3,4-dichlorophenyl)propanoic acid
  SITE 14: note = N4-(2-aminoethyl)-N4-methyl-L-asparagine, useful for stapling/stapled with another amino acid residue comprising a side chain acid group to form a staple through the amino group in the side chain
  SITE 14: note = C-term amino
XDIXDXXAFEXFXN

SEQ ID NO: 1060 - protein, 14 aa, synthetic construct
  SITE 1: note = N-term Acetic Acid
  SITE 1: note = (R)-2-allylpyrrolidine-2-carboxylic acid, useful for stapling/stapled with another amino acid residue comprising an olefin group to form a staple through the olefin group
  VARIANT 4: note = 2-amino-2-(pent-4-en-1-yl)hept-6-enoic acid, useful for stapling/stapled with another amino acid residue comprising an olefin group to form a staple through one of the two olefin groups and/or with another amino acid residue comprising an olefin group to form a staple through the other of the two olefin groups
  SITE 6: note = (S)-3-(2-amino-2-carboxyethyl)benzoic acid
  SITE 7: note = 2-amino-2-methylpropanoic acid
  SITE 10: note = N4-(2-aminoethyl)-N4-methyl-L-asparagine, useful for stapling/stapled with another amino acid residue comprising a side chain acid group to form a staple through the amino group in the side chain
  SITE 11: note (S)-3-amino-1-((pent-4-en-1-yloxy)carbonyl)pyrrolidine-3-ca rboxylic acid, useful for stapling/stapled with another amino acid residue comprising an olefin group to form a staple through the olefin group
  SITE 13: note = (S)-2-amino-3-(3,4-dichlorophenyl)propanoic acid
  SITE 14: note = L-glutamic acid, useful for stapling/stapled with another amino acid residue comprising a side chain amino group to form a staple through the 4-carboxyl group
  SITE 14: note = C-term amino
XDIXDXXAFNXFXE

SEQ ID NO: 1061 - protein, 14 aa, synthetic construct
  SITE 1: note = N-term Acetic Acid
  SITE 1: note = (R)-2-allylpyrrolidine-2-carboxylic acid, useful for stapling/stapled with another amino acid residue comprising an olefin group to form a staple through the olefin group
  VARIANT 4: note = 2-amino-2-(pent-4-en-1-yl)hept-6-enoic acid, useful for stapling/stapled with another amino acid residue comprising an olefin group to form a staple through one of the two olefin groups and/or with another amino acid residue comprising an olefin group to form a staple through the other of the two olefin groups
  SITE 6: note = (S)-3-(2-amino-2-carboxyethyl)benzoic acid
  SITE 7: note = 2-amino-2-methylpropanoic acid
  SITE 10: note = L-glutamic acid, useful for stapling/stapled with another amino acid residue comprising a side chain amino group to form a staple through the 4-carboxyl group
  SITE 11: note (S)-3-amino-1-((pent-4-en-1-yloxy)carbonyl)pyrrolidine-3-ca rboxylic acid, useful for stapling/stapled with another amino acid residue comprising an olefin group to form a staple through the olefin group
  SITE 13: note = (S)-2-amino-3-(3,4-dichlorophenyl)propanoic acid
  SITE 14: note = N4-((R)-pyrrolidin-3-yl)-L-asparagine, useful for stapling/stapled with another amino acid residue comprising a side chain acid group to form a staple through the amino group in the side chain
  SITE 14: note = C-term amino
XDIXDXXAFEXFXN

SEQ ID NO: 1062 - protein, 14 aa, synthetic construct
  SITE 1: note = N-term Acetic Acid
  SITE 1: note = (R)-2-allylpyrrolidine-2-carboxylic acid, useful for stapling/stapled with another amino acid residue comprising an olefin group to form a staple through the olefin group
  VARIANT 4: note = 2-amino-2-(pent-4-en-1-yl)hept-6-enoic acid, useful for stapling/stapled with another amino acid residue comprising an olefin group to form a staple through one of the two olefin groups and/or with another amino acid residue comprising an olefin group to form a staple through the other of the two olefin groups
  SITE 6: note = (S)-3-(2-amino-2-carboxyethyl)benzoic acid
  SITE 7: note = 2-amino-2-methylpropanoic acid
  SITE 10: note = N4-((R)-pyrrolidin-3-yl)-L-asparagine, useful for stapling/stapled with another amino acid residue comprising a side chain acid group to form a staple through the amino group in the side chain
  SITE 11: note (S)-3-amino-1-((pent-4-en-1-yloxy)carbonyl)pyrrolidine-3-ca rboxylic acid, useful for stapling/stapled with another amino acid residue comprising an olefin group to form a staple through the olefin group
  SITE 13: note = (S)-2-amino-3-(3,4-dichlorophenyl)propanoic acid
  SITE 14: note = L-aspartic acid, useful for stapling/stapled with another amino acid residue comprising a side chain amino group to form a staple through the acid group in the side chain
  SITE 14: note = C-term amino
XDIXDXXAFNXFXD

SEQ ID NO: 1063 - protein, 14 aa, synthetic construct
  SITE 1: note = N-term Acetic Acid
  SITE 1: note = (R)-2-allylpyrrolidine-2-carboxylic acid, useful for stapling/stapled with another amino acid residue comprising an olefin group to form a staple through the olefin group
  VARIANT 4: note = 2-amino-2-(pent-4-en-1-yl)hept-6-enoic acid, useful for stapling/stapled with another amino acid residue comprising an olefin group to form a staple through one of the two olefin groups and/or with another amino acid residue comprising an olefin group to form a staple through the other of the two olefin groups
  SITE 6: note = (S)-3-(2-amino-2-carboxyethyl)benzoic acid
  SITE 7: note = 2-amino-2-methylpropanoic acid
  SITE 10: note = N4-((R)-pyrrolidin-3-yl)-L-asparagine, useful for stapling/stapled with another amino acid residue comprising a side chain acid group to form a staple through the amino group in the side chain
  SITE 11: note (S)-3-amino-1-((pent-4-en-1-yloxy)carbonyl)pyrrolidine-3-ca rboxylic acid, useful for stapling/stapled with another amino acid residue comprising an olefin group to form a staple through the olefin group
  SITE 13: note = (S)-2-amino-3-(3,4-dichlorophenyl)propanoic acid
  SITE 14: note = L-glutamic acid, useful for stapling/stapled with another amino acid residue comprising a side chain amino group to form a staple through the 4-carboxyl group
  SITE 14: note = C-term amino
XDIXDXXAFNXFXE

SEQ ID NO: 1064 - protein, 14 aa, synthetic construct
  SITE 1: note = N-term Acetic Acid
  SITE 1: note = (R)-2-allylpyrrolidine-2-carboxylic acid, useful for stapling/stapled with another amino acid residue comprising an olefin group to form a staple through the olefin group
  VARIANT 4: note = 2-amino-2-(pent-4-en-1-yl)hept-6-enoic acid, useful for stapling/stapled with another amino acid residue comprising an olefin group to form a staple through one of the two olefin groups and/or with another amino acid residue comprising an olefin group to form a staple through the other of the two olefin groups
  SITE 6: note = (S)-3-(2-amino-2-carboxyethyl)benzoic acid
  SITE 7: note = 2-amino-2-methylpropanoic acid
  SITE 10: note = L-aspartic acid, useful for stapling/stapled with another amino acid residue comprising a side chain amino group to form a staple through the acid group in the side chain
  SITE 11: note (S)-3-amino-1-((pent-4-en-1-yloxy)carbonyl)pyrrolidine-3-ca rboxylic acid, useful for stapling/stapled with another amino acid residue comprising an olefin group to form a staple through the olefin group
  SITE 13: note = (S)-2-amino-3-(3,4-dichlorophenyl)propanoic acid
  SITE 14: note = N4-((S)-pyrrolidin-3-yl)-L-asparagine, useful for stapling/stapled with another amino acid residue comprising a side chain acid group to form a staple through the amino group in the side chain
  SITE 14: note = C-term amino
XDIXDXXAFDXFXN

SEQ ID NO: 1065 - protein, 14 aa, synthetic construct
  SITE 1: note = N-term Acetic Acid
  SITE 1: note = (R)-2-allylpyrrolidine-2-carboxylic acid, useful for stapling/stapled with another amino acid residue comprising an olefin group to form a staple through the olefin group
  VARIANT 4: note = 2-amino-2-(pent-4-en-1-yl)hept-6-enoic acid, useful for stapling/stapled with another amino acid residue comprising an olefin group to form a staple through one of the two olefin groups and/or with another amino acid residue comprising an olefin group to form a staple through the other of the two olefin groups
  SITE 6: note = (S)-3-(2-amino-2-carboxyethyl)benzoic acid
  SITE 7: note = 2-amino-2-methylpropanoic acid
  SITE 10: note = L-glutamic acid, useful for stapling/stapled with another amino acid residue comprising a side chain amino group to form a staple through the 4-carboxyl group
  SITE 11: note (S)-3-amino-1-((pent-4-en-1-yloxy)carbonyl)pyrrolidine-3-ca rboxylic acid, useful for stapling/stapled with another amino acid residue comprising an olefin group to form a staple through the olefin group
  SITE 13: note = (S)-2-amino-3-(3,4-dichlorophenyl)propanoic acid
  SITE 14: note = N4-((S)-pyrrolidin-3-yl)-L-asparagine, useful for stapling/stapled with another amino acid residue comprising a side chain acid group to form a staple through the amino group in the side chain
  SITE 14: note = C-term amino
XDIXDXXAFEXFXN

SEQ ID NO: 1066 - protein, 14 aa, synthetic construct
  SITE 1: note = N-term Acetic Acid
  SITE 1: note = (R)-2-allylpyrrolidine-2-carboxylic acid, useful for stapling/stapled with another amino acid residue comprising an olefin group to form a staple through the olefin group
  VARIANT 4: note = 2-amino-2-(pent-4-en-1-yl)hept-6-enoic acid, useful for stapling/stapled with another amino acid residue comprising an olefin group to form a staple through one of the two olefin groups and/or with another amino acid residue comprising an olefin group to form a staple through the other of the two olefin groups
  SITE 6: note = (S)-3-(2-amino-2-carboxyethyl)benzoic acid
  SITE 7: note = 2-amino-2-methylpropanoic acid
  SITE 10: note = N4-((S)-pyrrolidin-3-yl)-L-asparagine, useful for stapling/stapled with another amino acid residue comprising a side chain acid group to form a staple through the amino group in the side chain
  SITE 11: note (S)-3-amino-1-((pent-4-en-1-yloxy)carbonyl)pyrrolidine-3-ca rboxylic acid, useful for stapling/stapled with another amino acid residue comprising an olefin group to form a staple through the olefin group
  SITE 13: note = (S)-2-amino-3-(3,4-dichlorophenyl)propanoic acid
  SITE 14: note = L-aspartic acid, useful for stapling/stapled with another amino acid residue comprising a side chain amino group to form a staple through the acid group in the side chain
  SITE 14: note = C-term amino
XDIXDXXAFNXFXD

SEQ ID NO: 1067 - protein, 15 aa, synthetic construct
  SITE 1: note = N-term Acetic Acid
  SITE 1: note = (R)-2-allylpyrrolidine-2-carboxylic acid, useful for stapling/stapled with another amino acid residue comprising an olefin group to form a staple through the olefin group
  SITE 3: note = (S)-2-amino-4,4-dimethylpentanoic acid
  VARIANT 4: note = 2-amino-2-(pent-4-en-1-yl)hept-6-enoic acid, useful for stapling/stapled with another amino acid residue comprising an olefin group to form a staple through one of the two olefin groups and/or with another amino acid residue comprising an olefin group to form a staple through the other of the two olefin groups
  SITE 6: note = (S)-3-(2-amino-2-carboxyethyl)benzoic acid
  SITE 7: note = 2-amino-2-methylpropanoic acid
  SITE 10: note = L-homocysteine, sulfur bonded to the methyl at position 2 of 2,6-dimethylpyridine, useful for stapling/stapled with another thiol through the methyl position 6 of 2,6-dimethylpyridine
  SITE 11: note (S)-3-amino-1-((pent-4-en-1-yloxy)carbonyl)pyrrolidine-3-ca rboxylic acid, useful for stapling/stapled with another amino acid residue comprising an olefin group to form a staple through the olefin group
  SITE 12: note = (S)-2-amino-3-(thiophen-3-yl)propanoic acid
  SITE 13: note = (S)-2-amino-3-(benzo[b]thiophen-3-yl)propanoic acid
  SITE 14: note = (R)-2-amino-3-mercapto-2-methylpropanoic acid, useful for stapling/stapled with another amino acid residue to form a staple through the thiol group
  SITE 15: note = C-term amino
XDXXDXXAFCXXXXA

SEQ ID NO: 1068 - protein, 15 aa, synthetic construct
  SITE 1: note = N-term Acetic Acid
  SITE 1: note = (R)-2-allylpyrrolidine-2-carboxylic acid, useful for stapling/stapled with another amino acid residue comprising an olefin group to form a staple through the olefin group
  SITE 3: note = (S)-2-amino-4,4-dimethylpentanoic acid
  VARIANT 4: note = 2-amino-2-(pent-4-en-1-yl)hept-6-enoic acid, useful for stapling/stapled with another amino acid residue comprising an olefin group to form a staple through one of the two olefin groups and/or with another amino acid residue comprising an olefin group to form a staple through the other of the two olefin groups
  SITE 6: note = (S)-3-(2-amino-2-carboxyethyl)benzoic acid
  SITE 7: note = 2-amino-2-methylpropanoic acid
  SITE 10: note = L-homocysteine, sulfur bonded to the methyl at position 1 of 1,3,5-trimethylbenzene, useful for stapling/stapled with another thiol through the methyl at position 3 of 1,3,5-trimethylbenzene
  SITE 11: note (S)-3-amino-1-((pent-4-en-1-yloxy)carbonyl)pyrrolidine-3-ca rboxylic acid, useful for stapling/stapled with another amino acid residue comprising an olefin group to form a staple through the olefin group
  SITE 12: note = (S)-2-amino-3-(thiophen-3-yl)propanoic acid
  SITE 13: note = (S)-2-amino-3-(benzo[b]thiophen-3-yl)propanoic acid
  SITE 14: note = (R)-2-amino-3-mercapto-2-methylpropanoic acid, useful for stapling/stapled with another amino acid residue to form a staple through the thiol group
  SITE 15: note = C-term amino
XDXXDXXAFCXXXXA

SEQ ID NO: 1069 - protein, 15 aa, synthetic construct
  SITE 1: note = N-term Acetic Acid
  SITE 1: note = (R)-2-allylpyrrolidine-2-carboxylic acid, useful for stapling/stapled with another amino acid residue comprising an olefin group to form a staple through the olefin group
  SITE 3: note = (S)-2-amino-4,4-dimethylpentanoic acid
  VARIANT 4: note = 2-amino-2-(pent-4-en-1-yl)hept-6-enoic acid, useful for stapling/stapled with another amino acid residue comprising an olefin group to form a staple through one of the two olefin groups and/or with another amino acid residue comprising an olefin group to form a staple through the other of the two olefin groups
  SITE 6: note = (S)-3-(2-amino-2-carboxyethyl)benzoic acid
  SITE 7: note = 2-amino-2-methylpropanoic acid
  SITE 10: note = L-homocysteine, sulfur bonded to position 1 of propane, useful for stapling/stapled with another thiol through position 3 of propane
  SITE 11: note (S)-3-amino-1-((pent-4-en-1-yloxy)carbonyl)pyrrolidine-3-ca rboxylic acid, useful for stapling/stapled with another amino acid residue comprising an olefin group to form a staple through the olefin group
  SITE 12: note = (S)-2-amino-3-(thiophen-3-yl)propanoic acid
  SITE 13: note = (S)-2-amino-3-(benzo[b]thiophen-3-yl)propanoic acid
  SITE 14: note = (R)-2-amino-3-mercapto-2-methylpropanoic acid, useful for stapling/stapled with another amino acid residue to form a staple through the thiol group
  SITE 15: note = C-term amino
XDXXDXXAFCXXXXA

SEQ ID NO: 1070 - protein, 15 aa, synthetic construct
  SITE 1: note = N-term Acetic Acid
  SITE 1: note = (R)-2-allylpyrrolidine-2-carboxylic acid, useful for stapling/stapled with another amino acid residue comprising an olefin group to form a staple through the olefin group
  SITE 3: note = (S)-2-amino-4,4-dimethylpentanoic acid
  VARIANT 4: note = 2-amino-2-(pent-4-en-1-yl)hept-6-enoic acid, useful for stapling/stapled with another amino acid residue comprising an olefin group to form a staple through one of the two olefin groups and/or with another amino acid residue comprising an olefin group to form a staple through the other of the two olefin groups
  SITE 6: note = (S)-3-(2-amino-2-carboxyethyl)benzoic acid
  SITE 7: note = 2-amino-2-methylpropanoic acid
  SITE 10: note = L-homocysteine, sulfur bonded to position 1 of butane, useful for stapling/stapled with another thiol through position 4 of butane
  SITE 11: note (S)-3-amino-1-((pent-4-en-1-yloxy)carbonyl)pyrrolidine-3-ca rboxylic acid, useful for stapling/stapled with another amino acid residue comprising an olefin group to form a staple through the olefin group
  SITE 12: note = (S)-2-amino-3-(thiophen-3-yl)propanoic acid
  SITE 13: note = (S)-2-amino-3-(benzo[b]thiophen-3-yl)propanoic acid
  SITE 14: note = (R)-2-amino-3-mercapto-2-methylpropanoic acid, useful for stapling/stapled with another amino acid residue to form a staple through the thiol group
  SITE 15: note = C-term amino
XDXXDXXAFCXXXXA

SEQ ID NO: 1071 - protein, 15 aa, synthetic construct
  SITE 1: note = N-term Acetic Acid
  SITE 1: note = (R)-2-allylpyrrolidine-2-carboxylic acid, useful for stapling/stapled with another amino acid residue comprising an olefin group to form a staple through the olefin group
  SITE 3: note = (S)-2-amino-4,4-dimethylpentanoic acid
  VARIANT 4: note = 2-amino-2-(pent-4-en-1-yl)hept-6-enoic acid, useful for stapling/stapled with another amino acid residue comprising an olefin group to form a staple through one of the two olefin groups and/or with another amino acid residue comprising an olefin group to form a staple through the other of the two olefin groups
  SITE 6: note = (S)-3-(2-amino-2-carboxyethyl)benzoic acid
  SITE 7: note = 2-amino-2-methylpropanoic acid
  SITE 10: note = L-homocysteine, sulfur bonded to position 1 of but-2-ene, useful for stapling/stapled with another thiol through position 4 of but-2-ene
  SITE 11: note (S)-3-amino-1-((pent-4-en-1-yloxy)carbonyl)pyrrolidine-3-ca rboxylic acid, useful for stapling/stapled with another amino acid residue comprising an olefin group to form a staple through the olefin group
  SITE 12: note = (S)-2-amino-3-(thiophen-3-yl)propanoic acid
  SITE 13: note = (S)-2-amino-3-(benzo[b]thiophen-3-yl)propanoic acid
  SITE 14: note = (R)-2-amino-3-mercapto-2-methylpropanoic acid, useful for stapling/stapled with another amino acid residue to form a staple through the thiol group
  SITE 15: note = C-term amino
XDXXDXXAFCXXXXA

SEQ ID NO: 1072 - protein, 15 aa, synthetic construct
  SITE 1: note = N-term Acetic Acid
  SITE 1: note = (R)-2-allylpyrrolidine-2-carboxylic acid, useful for stapling/stapled with another amino acid residue comprising an olefin group to form a staple through the olefin group
  SITE 3: note = (S)-2-amino-4,4-dimethylpentanoic acid
  VARIANT 4: note = 2-amino-2-(pent-4-en-1-yl)hept-6-enoic acid, useful for stapling/stapled with another amino acid residue comprising an olefin group to form a staple through one of the two olefin groups and/or with another amino acid residue comprising an olefin group to form a staple through the other of the two olefin groups
  SITE 6: note = (S)-3-(2-amino-2-carboxyethyl)benzoic acid
  SITE 7: note = 2-amino-2-methylpropanoic acid
  SITE 10: note = L-homocysteine, sulfur bonded to position 1 of propan-2-one, useful for stapling/stapled with another thiol through position 3 of propan-2-one
  SITE 11: note (S)-3-amino-1-((pent-4-en-1-yloxy)carbonyl)pyrrolidine-3-ca rboxylic acid, useful for stapling/stapled with another amino acid residue comprising an olefin group to form a staple through the olefin group
  SITE 12: note = (S)-2-amino-3-(thiophen-3-yl)propanoic acid
  SITE 13: note = (S)-2-amino-3-(benzo[b]thiophen-3-yl)propanoic acid
  SITE 14: note = (R)-2-amino-3-mercapto-2-methylpropanoic acid, useful for stapling/stapled with another amino acid residue to form a staple through the thiol group
  SITE 15: note = C-term amino
XDXXDXXAFCXXXXA

SEQ ID NO: 1073 - protein, 15 aa, synthetic construct
  SITE 1: note = N-term Acetic Acid
  SITE 1: note = (R)-2-allylpyrrolidine-2-carboxylic acid, useful for stapling/stapled with another amino acid residue comprising an olefin group to form a staple through the olefin group
  SITE 3: note = (S)-2-amino-4,4-dimethylpentanoic acid
  VARIANT 4: note = 2-amino-2-(pent-4-en-1-yl)hept-6-enoic acid, useful for stapling/stapled with another amino acid residue comprising an olefin group to form a staple through one of the two olefin groups and/or with another amino acid residue comprising an olefin group to form a staple through the other of the two olefin groups
  SITE 6: note = (S)-4-((2-amino-2-carboxyethyl)amino)-4-oxobutanoic acid
  SITE 7: note = 2-amino-2-methylpropanoic acid
  SITE 10: note = L-lysine, useful for stapling/stapled with another amino acid residue comprising a side chain acid group to form a staple through the 6-amino group
  SITE 11: note (S)-3-amino-1-((pent-4-en-1-yloxy)carbonyl)pyrrolidine-3-ca rboxylic acid, useful for stapling/stapled with another amino acid residue comprising an olefin group to form a staple through the olefin group
  SITE 12: note = (S)-2-amino-3-(thiophen-3-yl)propanoic acid
  SITE 13: note = (S)-2-amino-3-(benzo[b]thiophen-3-yl)propanoic acid
  SITE 14: note = L-glutamic acid, useful for stapling/stapled with another amino acid residue comprising a side chain amino group to form a staple through the 4-carboxyl group
  SITE 15: note = C-term amino
XDXXDXXAFKXXXEA

SEQ ID NO: 1074 - protein, 15 aa, synthetic construct
  SITE 1: note = N-term Acetic Acid
  SITE 1: note = (R)-2-allylpyrrolidine-2-carboxylic acid, useful for stapling/stapled with another amino acid residue comprising an olefin group to form a staple through the olefin group
  SITE 3: note = (S)-2-amino-4,4-dimethylpentanoic acid
  VARIANT 4: note = 2-amino-2-(pent-4-en-1-yl)hept-6-enoic acid, useful for stapling/stapled with another amino acid residue comprising an olefin group to form a staple through one of the two olefin groups and/or with another amino acid residue comprising an olefin group to form a staple through the other of the two olefin groups
  SITE 6: note = (S)-2-amino-3-(2-carboxyacetamido)propanoic acid
  SITE 7: note = 2-amino-2-methylpropanoic acid
  SITE 10: note = L-lysine, useful for stapling/stapled with another amino acid residue comprising a side chain acid group to form a staple through the 6-amino group
  SITE 11: note (S)-3-amino-1-((pent-4-en-1-yloxy)carbonyl)pyrrolidine-3-ca rboxylic acid, useful for stapling/stapled with another amino acid residue comprising an olefin group to form a staple through the olefin group
  SITE 12: note = (S)-2-amino-3-(thiophen-3-yl)propanoic acid
  SITE 13: note = (S)-2-amino-3-(benzo[b]thiophen-3-yl)propanoic acid
  SITE 14: note = L-glutamic acid, useful for stapling/stapled with another amino acid residue comprising a side chain amino group to form a staple through the 4-carboxyl group
  SITE 15: note = C-term amino
XDXXDXXAFKXXXEA

SEQ ID NO: 1075 - protein, 15 aa, synthetic construct
  SITE 1: note = N-term Acetic Acid
  SITE 1: note = (R)-2-allylpyrrolidine-2-carboxylic acid, useful for stapling/stapled with another amino acid residue comprising an olefin group to form a staple through the olefin group
  SITE 3: note = (S)-2-amino-4,4-dimethylpentanoic acid
  VARIANT 4: note = 2-amino-2-(pent-4-en-1-yl)hept-6-enoic acid, useful for stapling/stapled with another amino acid residue comprising an olefin group to form a staple through one of the two olefin groups and/or with another amino acid residue comprising an olefin group to form a staple through the other of the two olefin groups
  SITE 6: note (S)-3-((2-amino-2-carboxyethyl)amino)-2,2-dimethyl-3- oxopropanoic acid
  SITE 7: note = 2-amino-2-methylpropanoic acid
  SITE 10: note = L-lysine, useful for stapling/stapled with another amino acid residue comprising a side chain acid group to form a staple through the 6-amino group
  SITE 11: note (S)-3-amino-1-((pent-4-en-1-yloxy)carbonyl)pyrrolidine-3-ca rboxylic acid, useful for stapling/stapled with another amino acid residue comprising an olefin group to form a staple through the olefin group
  SITE 12: note = (S)-2-amino-3-(thiophen-3-yl)propanoic acid
  SITE 13: note = (S)-2-amino-3-(benzo[b]thiophen-3-yl)propanoic acid
  SITE 14: note = L-glutamic acid, useful for stapling/stapled with another amino acid residue comprising a side chain amino group to form a staple through the 4-carboxyl group
  SITE 15: note = C-term amino
XDXXDXXAFKXXXEA

SEQ ID NO: 1076 - protein, 15 aa, synthetic construct
  SITE 1: note = N-term Acetic Acid
  SITE 1: note = (R)-2-allylpyrrolidine-2-carboxylic acid, useful for stapling/stapled with another amino acid residue comprising an olefin group to form a staple through the olefin group
  SITE 3: note = (S)-2-amino-4,4-dimethylpentanoic acid
  VARIANT 4: note = 2-amino-2-(pent-4-en-1-yl)hept-6-enoic acid, useful for stapling/stapled with another amino acid residue comprising an olefin group to form a staple through one of the two olefin groups and/or with another amino acid residue comprising an olefin group to form a staple through the other of the two olefin groups
  SITE 6: note (S)-3-(((S)-2-amino-2-carboxyethyl)carbamoyl)-4-methylpenta noic acid
  SITE 7: note = 2-amino-2-methylpropanoic acid
  SITE 10: note = L-lysine, useful for stapling/stapled with another amino acid residue comprising a side chain acid group to form a staple through the 6-amino group
  SITE 11: note (S)-3-amino-1-((pent-4-en-1-yloxy)carbonyl)pyrrolidine-3-ca rboxylic acid, useful for stapling/stapled with another amino acid residue comprising an olefin group to form a staple through the olefin group
  SITE 12: note = (S)-2-amino-3-(thiophen-3-yl)propanoic acid
  SITE 13: note = (S)-2-amino-3-(benzo[b]thiophen-3-yl)propanoic acid
  SITE 14: note = L-glutamic acid, useful for stapling/stapled with another amino acid residue comprising a side chain amino group to form a staple through the 4-carboxyl group
  SITE 15: note = C-term amino
XDXXDXXAFKXXXEA

SEQ ID NO: 1077 - protein, 15 aa, synthetic construct
  SITE 1: note = N-term Acetic Acid
  SITE 1: note = (R)-2-allylpyrrolidine-2-carboxylic acid, useful for stapling/stapled with another amino acid residue comprising an olefin group to form a staple through the olefin group
  SITE 3: note = (S)-2-amino-4,4-dimethylpentanoic acid
  VARIANT 4: note = 2-amino-2-(pent-4-en-1-yl)hept-6-enoic acid, useful for stapling/stapled with another amino acid residue comprising an olefin group to form a staple through one of the two olefin groups and/or with another amino acid residue comprising an olefin group to form a staple through the other of the two olefin groups
  SITE 6: note (R)-4-(((S)-2-amino-2-carboxyethyl)amino)-3-methyl-4-oxobut anoic acid
  SITE 7: note = 2-amino-2-methylpropanoic acid
  SITE 10: note = L-lysine, useful for stapling/stapled with another amino acid residue comprising a side chain acid group to form a staple through the 6-amino group
  SITE 11: note (S)-3-amino-1-((pent-4-en-1-yloxy)carbonyl)pyrrolidine-3-ca rboxylic acid, useful for stapling/stapled with another amino acid residue comprising an olefin group to form a staple through the olefin group
  SITE 12: note = (S)-2-amino-3-(thiophen-3-yl)propanoic acid
  SITE 13: note = (S)-2-amino-3-(benzo[b]thiophen-3-yl)propanoic acid
  SITE 14: note = L-glutamic acid, useful for stapling/stapled with another amino acid residue comprising a side chain amino group to form a staple through the 4-carboxyl group
  SITE 15: note = C-term amino
XDXXDXXAFKXXXEA

SEQ ID NO: 1078 - protein, 15 aa, synthetic construct
  SITE 1: note = N-term Acetic Acid
  SITE 1: note = (R)-2-allylpyrrolidine-2-carboxylic acid, useful for stapling/stapled with another amino acid residue comprising an olefin group to form a staple through the olefin group
  SITE 3: note = (S)-2-amino-4,4-dimethylpentanoic acid
  VARIANT 4: note = 2-amino-2-(pent-4-en-1-yl)hept-6-enoic acid, useful for stapling/stapled with another amino acid residue comprising an olefin group to form a staple through one of the two olefin groups and/or with another amino acid residue comprising an olefin group to form a staple through the other of the two olefin groups
  SITE 6: note (R)-3-(((S)-2-amino-2-carboxyethyl)carbamoyl)-4-methylpenta noic acid
  SITE 7: note = 2-amino-2-methylpropanoic acid
  SITE 10: note = L-lysine, useful for stapling/stapled with another amino acid residue comprising a side chain acid group to form a staple through the 6-amino group
  SITE 11: note (S)-3-amino-1-((pent-4-en-1-yloxy)carbonyl)pyrrolidine-3-ca rboxylic acid, useful for stapling/stapled with another amino acid residue comprising an olefin group to form a staple through the olefin group
  SITE 12: note = (S)-2-amino-3-(thiophen-3-yl)propanoic acid
  SITE 13: note = (S)-2-amino-3-(benzo[b]thiophen-3-yl)propanoic acid
  SITE 14: note = L-glutamic acid, useful for stapling/stapled with another amino acid residue comprising a side chain amino group to form a staple through the 4-carboxyl group
  SITE 15: note = C-term amino
XDXXDXXAFKXXXEA

SEQ ID NO: 1079 - protein, 15 aa, synthetic construct
  SITE 1: note = N-term Acetic Acid
  SITE 1: note = (R)-2-allylpyrrolidine-2-carboxylic acid, useful for stapling/stapled with another amino acid residue comprising an olefin group to form a staple through the olefin group
  SITE 3: note = (S)-2-amino-4,4-dimethylpentanoic acid
  VARIANT 4: note = 2-amino-2-(pent-4-en-1-yl)hept-6-enoic acid, useful for stapling/stapled with another amino acid residue comprising an olefin group to form a staple through one of the two olefin groups and/or with another amino acid residue comprising an olefin group to form a staple through the other of the two olefin groups
  SITE 6: note = (S)-3-(2-amino-2-carboxyethyl)benzoic acid
  SITE 7: note = 2-amino-2-methylpropanoic acid
  SITE 10: note = (S)-2-amino-6-(1H-1,2,3-triazol-1-yl)hexanoic acid, useful for stapling/stapled with another amino acid residue to form a staple through the 4-position of the triazolyl group
  SITE 11: note (S)-3-amino-1-(4-vinylbenzoyl)pyrrolidine-3-carboxylic acid, useful for stapling/stapled with another amino acid residue comprising an olefin group to form a staple through the olefin group
  SITE 12: note = (S)-2-amino-3-(thiophen-3-yl)propanoic acid
  SITE 13: note = (S)-2-amino-3-(benzo[b]thiophen-3-yl)propanoic acid
  SITE 14: note = L-alanine, useful for stapling/stapled with another amino acid residue comprising a triazolyl group to form a staple through the terminal methyl group
  SITE 15: note = C-term amino
XDXXDXXAFXXXXAA

SEQ ID NO: 1080 - protein, 15 aa, synthetic construct
  SITE 1: note = N-term Acetic Acid
  SITE 1: note = (R)-2-allylpyrrolidine-2-carboxylic acid, useful for stapling/stapled with another amino acid residue comprising an olefin group to form a staple through the olefin group
  SITE 3: note = (S)-2-amino-4,4-dimethylpentanoic acid
  VARIANT 4: note = 2-amino-2-(pent-4-en-1-yl)hept-6-enoic acid, useful for stapling/stapled with another amino acid residue comprising an olefin group to form a staple through one of the two olefin groups and/or with another amino acid residue comprising an olefin group to form a staple through the other of the two olefin groups
  SITE 6: note = (S)-3-(2-amino-2-carboxyethyl)benzoic acid
  SITE 7: note = 2-amino-2-methylpropanoic acid
  SITE 10: note = (S)-2-amino-6-(1H-1,2,3-triazol-1-yl)hexanoic acid, useful for stapling/stapled with another amino acid residue to form a staple through the 4-position of the triazolyl group
  SITE 11: note (S)-1-(3-(allyloxy)benzoyl)-3-aminopyrrolidine-3-carboxylic acid, useful for stapling/stapled with another amino acid residue comprising an olefin group to form a staple through the olefin group
  SITE 12: note = (S)-2-amino-3-(thiophen-3-yl)propanoic acid
  SITE 13: note = (S)-2-amino-3-(benzo[b]thiophen-3-yl)propanoic acid
  SITE 14: note = L-alanine, useful for stapling/stapled with another amino acid residue comprising a triazolyl group to form a staple through the terminal methyl group
  SITE 15: note = C-term amino
XDXXDXXAFXXXXAA

SEQ ID NO: 1081 - protein, 15 aa, synthetic construct
  SITE 1: note = N-term Acetic Acid
  SITE 1: note = (R)-2-allylpyrrolidine-2-carboxylic acid, useful for stapling/stapled with another amino acid residue comprising an olefin group to form a staple through the olefin group
  SITE 3: note = (S)-2-amino-4,4-dimethylpentanoic acid
  VARIANT 4: note = 2-amino-2-(pent-4-en-1-yl)hept-6-enoic acid, useful for stapling/stapled with another amino acid residue comprising an olefin group to form a staple through one of the two olefin groups and/or with another amino acid residue comprising an olefin group to form a staple through the other of the two olefin groups
  SITE 6: note = (S)-3-(2-amino-2-carboxyethyl)benzoic acid
  SITE 7: note = 2-amino-2-methylpropanoic acid
  SITE 10: note = (S)-2-amino-6-(1H-1,2,3-triazol-1-yl)hexanoic acid, useful for stapling/stapled with another amino acid residue to form a staple through the 4-position of the triazolyl group
  SITE 11: note (S)-3-amino-1-(but-3-enoyl-L-valyl)pyrrolidine-3-carboxylic acid, useful for stapling/stapled with another amino acid residue comprising an olefin group to form a staple through the olefin group
  SITE 12: note = (S)-2-amino-3-(thiophen-3-yl)propanoic acid
  SITE 13: note = (S)-2-amino-3-(benzo[b]thiophen-3-yl)propanoic acid
  SITE 14: note = L-alanine, useful for stapling/stapled with another amino acid residue comprising a triazolyl group to form a staple through the terminal methyl group
  SITE 15: note = C-term amino
XDXXDXXAFXXXXAA

SEQ ID NO: 1082 - protein, 15 aa, synthetic construct
  SITE 1: note = N-term Acetic Acid
  SITE 1: note = (R)-2-allylpyrrolidine-2-carboxylic acid, useful for stapling/stapled with another amino acid residue comprising an olefin group to form a staple through the olefin group
  SITE 3: note = (S)-2-amino-4,4-dimethylpentanoic acid
  VARIANT 4: note = 2-amino-2-(pent-4-en-1-yl)hept-6-enoic acid, useful for stapling/stapled with another amino acid residue comprising an olefin group to form a staple through one of the two olefin groups and/or with another amino acid residue comprising an olefin group to form a staple through the other of the two olefin groups
  SITE 6: note = (S)-3-(2-amino-2-carboxyethyl)benzoic acid
  SITE 7: note = 2-amino-2-methylpropanoic acid
  SITE 10: note = (S)-2-amino-6-(1H-1,2,3-triazol-1-yl)hexanoic acid, useful for stapling/stapled with another amino acid residue to form a staple through the 4-position of the triazolyl group
  SITE 11: note (S)-3-amino-1-(but-3-enoyl-D-valyl)pyrrolidine-3-carboxylic acid, useful for stapling/stapled with another amino acid residue comprising an olefin group to form a staple through the olefin group
  SITE 12: note = (S)-2-amino-3-(thiophen-3-yl)propanoic acid
  SITE 13: note = (S)-2-amino-3-(benzo[b]thiophen-3-yl)propanoic acid
  SITE 14: note = L-alanine, useful for stapling/stapled with another amino acid residue comprising a triazolyl group to form a staple through the terminal methyl group
  SITE 15: note = C-term amino
XDXXDXXAFXXXXAA

SEQ ID NO: 1083 - protein, 15 aa, synthetic construct
  SITE 1: note = N-term Acetic Acid
  SITE 1: note = (R)-2-allylpyrrolidine-2-carboxylic acid, useful for stapling/stapled with another amino acid residue comprising an olefin group to form a staple through the olefin group
  SITE 3: note = (S)-2-amino-4,4-dimethylpentanoic acid
  VARIANT 4: note = 2-amino-2-(pent-4-en-1-yl)hept-6-enoic acid, useful for stapling/stapled with another amino acid residue comprising an olefin group to form a staple through one of the two olefin groups and/or with another amino acid residue comprising an olefin group to form a staple through the other of the two olefin groups
  SITE 6: note = (S)-3-(2-amino-2-carboxyethyl)benzoic acid
  SITE 7: note = 2-amino-2-methylpropanoic acid
  SITE 10: note = (S)-2-amino-6-(1H-1,2,3-triazol-1-yl)hexanoic acid, useful for stapling/stapled with another amino acid residue to form a staple through the 4-position of the triazolyl group
  SITE 11: note (S)-3-amino-1-(N-(but-3-enoyl)-N-methylglycyl)pyrrolidine-3 -carboxylic acid, useful for stapling/stapled with another amino acid residue comprising an olefin group to form a staple through the olefin group
  SITE 12: note = (S)-2-amino-3-(thiophen-3-yl)propanoic acid
  SITE 13: note = (S)-2-amino-3-(benzo[b]thiophen-3-yl)propanoic acid
  SITE 14: note = L-alanine, useful for stapling/stapled with another amino acid residue comprising a triazolyl group to form a staple through the terminal methyl group
  SITE 15: note = C-term amino
XDXXDXXAFXXXXAA

SEQ ID NO: 1084 - protein, 15 aa, synthetic construct
  SITE 1: note = N-term Acetic Acid
  SITE 1: note = (R)-2-allylpyrrolidine-2-carboxylic acid, useful for stapling/stapled with another amino acid residue comprising an olefin group to form a staple through the olefin group
  SITE 3: note = (S)-2-amino-4,4-dimethylpentanoic acid
  VARIANT 4: note = 2-amino-2-(pent-4-en-1-yl)hept-6-enoic acid, useful for stapling/stapled with another amino acid residue comprising an olefin group to form a staple through one of the two olefin groups and/or with another amino acid residue comprising an olefin group to form a staple through the other of the two olefin groups
  SITE 6: note = (S)-3-(2-amino-2-carboxyethyl)benzoic acid
  SITE 7: note = 2-amino-2-methylpropanoic acid
  SITE 10: note = (S)-2-amino-6-(1H-1,2,3-triazol-1-yl)hexanoic acid, useful for stapling/stapled with another amino acid residue to form a staple through the 4-position of the triazolyl group
  SITE 11: note (S)-3-amino-1-((S)-1-(but-3-enoyl)piperidine-3-carbonyl) pyrrolidine-3-carboxylic acid, useful for stapling/stapled with another amino acid residue comprising an olefin group to form a staple through the olefin group
  SITE 12: note = (S)-2-amino-3-(thiophen-3-yl)propanoic acid
  SITE 13: note = (S)-2-amino-3-(benzo[b]thiophen-3-yl)propanoic acid
  SITE 14: note = L-alanine, useful for stapling/stapled with another amino acid residue comprising a triazolyl group to form a staple through the terminal methyl group
  SITE 15: note = C-term amino
XDXXDXXAFXXXXAA

SEQ ID NO: 1085 - protein, 15 aa, synthetic construct
  SITE 1: note = N-term Acetic Acid
  SITE 1: note = (R)-2-allylpyrrolidine-2-carboxylic acid, useful for stapling/stapled with another amino acid residue comprising an olefin group to form a staple through the olefin group
  SITE 3: note = (S)-2-amino-4,4-dimethylpentanoic acid
  VARIANT 4: note = 2-amino-2-(pent-4-en-1-yl)hept-6-enoic acid, useful for stapling/stapled with another amino acid residue comprising an olefin group to form a staple through one of the two olefin groups and/or with another amino acid residue comprising an olefin group to form a staple through the other of the two olefin groups
  SITE 6: note = (S)-3-(2-amino-2-carboxyethyl)benzoic acid
  SITE 7: note = 2-amino-2-methylpropanoic acid
  SITE 10: note = (S)-2-amino-6-(1H-1,2,3-triazol-1-yl)hexanoic acid, useful for stapling/stapled with another amino acid residue to form a staple through the 4-position of the triazolyl group
  SITE 11: note (S)-3-amino-1-((R)-1-(but-3-enoyl)piperidine-3-carbonyl) pyrrolidine-3-carboxylic acid, useful for stapling/stapled with another amino acid residue comprising an olefin group to form a staple through the olefin group
  SITE 12: note = (S)-2-amino-3-(thiophen-3-yl)propanoic acid
  SITE 13: note = (S)-2-amino-3-(benzo[b]thiophen-3-yl)propanoic acid
  SITE 14: note = L-alanine, useful for stapling/stapled with another amino acid residue comprising a triazolyl group to form a staple through the terminal methyl group
  SITE 15: note = C-term amino
XDXXDXXAFXXXXAA

SEQ ID NO: 1086 - protein, 15 aa, synthetic construct
  SITE 1: note = N-term Acetic Acid
  SITE 1: note = (R)-2-allylpyrrolidine-2-carboxylic acid, useful for stapling/stapled with another amino acid residue comprising an olefin group to form a staple through the olefin group
  SITE 3: note = (S)-2-amino-4,4-dimethylpentanoic acid
  VARIANT 4: note = 2-amino-2-(pent-4-en-1-yl)hept-6-enoic acid, useful for stapling/stapled with another amino acid residue comprising an olefin group to form a staple through one of the two olefin groups and/or with another amino acid residue comprising an olefin group to form a staple through the other of the two olefin groups
  SITE 6: note = (S)-3-(2-amino-2-carboxyethyl)benzoic acid
  SITE 7: note = 2-amino-2-methylpropanoic acid
  SITE 10: note = (S)-2-amino-6-(1H-1,2,3-triazol-1-yl)hexanoic acid, useful for stapling/stapled with another amino acid residue to form a staple through the 4-position of the triazolyl group
  SITE 11: note (S)-3-amino-1-(but-3-enoyl-L-prolyl)pyrrolidine-3-carboxyli c acid, useful for stapling/stapled with another amino acid residue comprising an olefin group to form a staple through the olefin group
  SITE 12: note = (S)-2-amino-3-(thiophen-3-yl)propanoic acid
  SITE 13: note = (S)-2-amino-3-(benzo[b]thiophen-3-yl)propanoic acid
  SITE 14: note = L-alanine, useful for stapling/stapled with another amino acid residue comprising a triazolyl group to form a staple through the terminal methyl group
  SITE 15: note = C-term amino
XDXXDXXAFXXXXAA

SEQ ID NO: 1087 - protein, 15 aa, synthetic construct
  SITE 1: note = N-term Acetic Acid
  SITE 1: note = (R)-2-allylpyrrolidine-2-carboxylic acid, useful for stapling/stapled with another amino acid residue comprising an olefin group to form a staple through the olefin group
  SITE 3: note = (S)-2-amino-4,4-dimethylpentanoic acid
  VARIANT 4: note = 2-amino-2-(pent-4-en-1-yl)hept-6-enoic acid, useful for stapling/stapled with another amino acid residue comprising an olefin group to form a staple through one of the two olefin groups and/or with another amino acid residue comprising an olefin group to form a staple through the other of the two olefin groups
  SITE 6: note = (S)-3-(2-amino-2-carboxyethyl)benzoic acid
  SITE 7: note = 2-amino-2-methylpropanoic acid
  SITE 10: note = (S)-2-amino-6-(1H-1,2,3-triazol-1-yl)hexanoic acid, useful for stapling/stapled with another amino acid residue to form a staple through the 4-position of the triazolyl group
  SITE 11: note = (S)-3-amino-1-(2-methyl-2-(4-vinylphenyl)propanoyl) pyrrolidine-3-carboxylic acid, useful for stapling/stapled with another amino acid residue comprising an olefin group to form a staple through the olefin group
  SITE 12: note = (S)-2-amino-3-(thiophen-3-yl)propanoic acid
  SITE 13: note = (S)-2-amino-3-(benzo[b]thiophen-3-yl)propanoic acid
  SITE 14: note = L-alanine, useful for stapling/stapled with another amino acid residue comprising a triazolyl group to form a staple through the terminal methyl group
  SITE 15: note = C-term amino
XDXXDXXAFXXXXAA

SEQ ID NO: 1088 - protein, 15 aa, synthetic construct
  SITE 1: note = N-term Acetic Acid
  SITE 1: note = (R)-2-allylpyrrolidine-2-carboxylic acid, useful for stapling/stapled with another amino acid residue comprising an olefin group to form a staple through the olefin group
  SITE 3: note = (S)-2-amino-4,4-dimethylpentanoic acid
  VARIANT 4: note = 2-amino-2-(pent-4-en-1-yl)hept-6-enoic acid, useful for stapling/stapled with another amino acid residue comprising an olefin group to form a staple through one of the two olefin groups and/or with another amino acid residue comprising an olefin group to form a staple through the other of the two olefin groups
  SITE 6: note = (S)-3-(2-amino-2-carboxyethyl)benzoic acid
  SITE 7: note = 2-amino-2-methylpropanoic acid
  SITE 10: note = (S)-2-amino-6-(1H-1,2,3-triazol-1-yl)hexanoic acid, useful for stapling/stapled with another amino acid residue to form a staple through the 4-position of the triazolyl group
  SITE 11: note (S)-1-(3-allylbenzoyl)-3-aminopyrrolidine-3-carboxylic acid, useful for stapling/stapled with another amino acid residue comprising an olefin group to form a staple through the olefin group
  SITE 12: note = (S)-2-amino-3-(thiophen-3-yl)propanoic acid
  SITE 13: note = (S)-2-amino-3-(benzo[b]thiophen-3-yl)propanoic acid
  SITE 14: note = L-alanine, useful for stapling/stapled with another amino acid residue comprising a triazolyl group to form a staple through the terminal methyl group
  SITE 15: note = C-term amino
XDXXDXXAFXXXXAA

SEQ ID NO: 1089 - protein, 15 aa, synthetic construct
  SITE 1: note = N-term Acetic Acid
  SITE 1: note = (R)-2-allylpyrrolidine-2-carboxylic acid, useful for stapling/stapled with another amino acid residue comprising an olefin group to form a staple through the olefin group
  SITE 3: note = (S)-2-amino-4,4-dimethylpentanoic acid
  VARIANT 4: note = 2-amino-2-(pent-4-en-1-yl)hept-6-enoic acid, useful for stapling/stapled with another amino acid residue comprising an olefin group to form a staple through one of the two olefin groups and/or with another amino acid residue comprising an olefin group to form a staple through the other of the two olefin groups
  SITE 6: note = (S)-3-(2-amino-2-carboxyethyl)benzoic acid
  SITE 7: note = 2-amino-2-methylpropanoic acid
  SITE 10: note = Cysteine, sulfur bonded to the methyl at position 3 of 3,5-dimethylpyridine, useful for stapling/stapled with another thiol through the methyl at position 5 of 3,5-dimethylpyridine
  SITE 11: note (S)-3-amino-1-((pent-4-en-1-yloxy)carbonyl)pyrrolidine-3-ca rboxylic acid, useful for stapling/stapled with another amino acid residue comprising an olefin group to form a staple through the olefin group
  SITE 12: note = (S)-2-amino-3-(thiophen-3-yl)propanoic acid
  SITE 13: note = (S)-2-amino-3-(benzo[b]thiophen-3-yl)propanoic acid
  SITE 15: note = C-term amino
XDXXDXXAFCXXXCA

SEQ ID NO: 1090 - protein, 15 aa, synthetic construct
  SITE 1: note = N-term Acetic Acid
  SITE 1: note = (S)-2-amino-2-methyloct-7-enoic acid, useful for stapling/stapled with another amino acid residue comprising an olefin group to form a staple through the olefin group
  SITE 4: note = (S)-2-amino-4,4-dimethylpentanoic acid
  VARIANT 5: note = 2-amino-2-(pent-4-en-1-yl)hept-6-enoic acid, useful for stapling/stapled with another amino acid residue comprising an olefin group to form a staple through one of the two olefin groups and/or with another amino acid residue comprising an olefin group to form a staple through the other of the two olefin groups
  SITE 7: note = (S)-3-(2-amino-2-carboxyethyl)benzoic acid
  SITE 8: note = 2-amino-2-methylpropanoic acid
  SITE 11: note = L-lysine, useful for stapling/stapled with another amino acid residue comprising a side chain acid group to form a staple through the 6-amino group
  SITE 12: note (S)-3-amino-1-((pent-4-en-1-yloxy)carbonyl)pyrrolidine-3-ca rboxylic acid, useful for stapling/stapled with another amino acid residue comprising an olefin group to form a staple through the olefin group
  SITE 14: note = (S)-2-amino-3-(3,4-dichlorophenyl)propanoic acid
  SITE 15: note = L-glutamic acid, useful for stapling/stapled with another amino acid residue comprising a side chain amino group to form a staple through the 4-carboxyl group
  SITE 15: note = C-term amino
XPDXXDXXAFKXFXE

SEQ ID NO: 1091 - protein, 15 aa, synthetic construct
  SITE 1: note = N-term Acetic Acid
  SITE 1: note = (R)-2-allylpyrrolidine-2-carboxylic acid, useful for stapling/stapled with another amino acid residue comprising an olefin group to form a staple through the olefin group
  SITE 3: note = (S)-2-amino-4,4-dimethylpentanoic acid
  VARIANT 4: note = 2-amino-2-(pent-4-en-1-yl)hept-6-enoic acid, useful for stapling/stapled with another amino acid residue comprising an olefin group to form a staple through one of the two olefin groups and/or with another amino acid residue comprising an olefin group to form a staple through the other of the two olefin groups
  SITE 6: note = (S)-3-(2-amino-2-carboxyethyl)benzoic acid
  SITE 7: note = 2-amino-2-methylpropanoic acid
  SITE 10: note = Cysteine, sulfur bonded to the methyl at position 1 of bis(methyl)-5-methoxybenzene, useful for stapling/stapled with another thiol through the methyl at position 3 of bis(methyl)-5-methoxybenzene
  SITE 11: note (S)-3-amino-1-((pent-4-en-1-yloxy)carbonyl)pyrrolidine-3-ca rboxylic acid, useful for stapling/stapled with another amino acid residue comprising an olefin group to form a staple through the olefin group
  SITE 12: note = (S)-2-amino-3-(thiophen-3-yl)propanoic acid
  SITE 13: note = (S)-2-amino-3-(benzo[b]thiophen-3-yl)propanoic acid
  SITE 15: note = C-term amino
XDXXDXXAFCXXXCA

SEQ ID NO: 1092 - protein, 15 aa, synthetic construct
  SITE 1: note = N-term Acetic Acid
  SITE 1: note = (R)-2-allylpyrrolidine-2-carboxylic acid, useful for stapling/stapled with another amino acid residue comprising an olefin group to form a staple through the olefin group
  SITE 3: note = (S)-2-amino-4,4-dimethylpentanoic acid
  VARIANT 4: note = 2-amino-2-(pent-4-en-1-yl)hept-6-enoic acid, useful for stapling/stapled with another amino acid residue comprising an olefin group to form a staple through one of the two olefin groups and/or with another amino acid residue comprising an olefin group to form a staple through the other of the two olefin groups
  SITE 6: note = (S)-3-(2-amino-2-carboxyethyl)benzoic acid
  SITE 7: note = 2-amino-2-methylpropanoic acid
  SITE 10: note = Cysteine, sulfur bonded to the methyl at position 2 of 2,6-dimethylpyridine, useful for stapling/stapled with another thiol through the methyl position 6 of 2,6-dimethylpyridine
  SITE 11: note (S)-3-amino-1-((pent-4-en-1-yloxy)carbonyl)pyrrolidine-3-ca rboxylic acid, useful for stapling/stapled with another amino acid residue comprising an olefin group to form a staple through the olefin group
  SITE 12: note = (S)-2-amino-3-(thiophen-3-yl)propanoic acid
  SITE 13: note = (S)-2-amino-3-(benzo[b]thiophen-3-yl)propanoic acid
  SITE 14: note = (R)-2-amino-3-mercapto-3-methylbutanoic acid, useful for stapling/stapled with another amino acid residue to form a staple through the thiol group
  SITE 15: note = C-term amino
XDXXDXXAFCXXXXA

SEQ ID NO: 1093 - protein, 15 aa, synthetic construct
  SITE 1: note = N-term Acetic Acid
  SITE 1: note = (R)-2-allylpyrrolidine-2-carboxylic acid, useful for stapling/stapled with another amino acid residue comprising an olefin group to form a staple through the olefin group
  SITE 3: note = (S)-2-amino-4,4-dimethylpentanoic acid
  VARIANT 4: note = 2-amino-2-(pent-4-en-1-yl)hept-6-enoic acid, useful for stapling/stapled with another amino acid residue comprising an olefin group to form a staple through one of the two olefin groups and/or with another amino acid residue comprising an olefin group to form a staple through the other of the two olefin groups
  SITE 6: note = (S)-3-(2-amino-2-carboxyethyl)benzoic acid
  SITE 7: note = 2-amino-2-methylpropanoic acid
  SITE 10: note = Cysteine, sulfur bonded to the methyl at position 3 of 3,5-dimethylpyridine, useful for stapling/stapled with another thiol through the methyl at position 5 of 3,5-dimethylpyridine
  SITE 11: note (S)-3-amino-1-((pent-4-en-1-yloxy)carbonyl)pyrrolidine-3-ca rboxylic acid, useful for stapling/stapled with another amino acid residue comprising an olefin group to form a staple through the olefin group
  SITE 12: note = (S)-2-amino-3-(thiophen-3-yl)propanoic acid
  SITE 13: note = (S)-2-amino-3-(benzo[b]thiophen-3-yl)propanoic acid
  SITE 14: note = (R)-2-amino-3-mercapto-3-methylbutanoic acid, useful for stapling/stapled with another amino acid residue to form a staple through the thiol group
  SITE 15: note = C-term amino
XDXXDXXAFCXXXXA

SEQ ID NO: 1094 - protein, 15 aa, synthetic construct
  SITE 1: note = N-term Acetic Acid
  SITE 1: note = (R)-2-allylpyrrolidine-2-carboxylic acid, useful for stapling/stapled with another amino acid residue comprising an olefin group to form a staple through the olefin group
  SITE 3: note = (S)-2-amino-4,4-dimethylpentanoic acid
  VARIANT 4: note = 2-amino-2-(pent-4-en-1-yl)hept-6-enoic acid, useful for stapling/stapled with another amino acid residue comprising an olefin group to form a staple through one of the two olefin groups and/or with another amino acid residue comprising an olefin group to form a staple through the other of the two olefin groups
  SITE 6: note = (S)-3-(2-amino-2-carboxyethyl)benzoic acid
  SITE 7: note = 2-amino-2-methylpropanoic acid
  SITE 10: note = Cysteine, sulfur bonded to the methyl at position 1 of bis(methyl)-5-methoxybenzene, useful for stapling/stapled with another thiol through the methyl at position 3 of bis(methyl)-5-methoxybenzene
  SITE 11: note (S)-3-amino-1-((pent-4-en-1-yloxy)carbonyl)pyrrolidine-3-ca rboxylic acid, useful for stapling/stapled with another amino acid residue comprising an olefin group to form a staple through the olefin group
  SITE 12: note = (S)-2-amino-3-(thiophen-3-yl)propanoic acid
  SITE 13: note = (S)-2-amino-3-(benzo[b]thiophen-3-yl)propanoic acid
  SITE 14: note = (R)-2-amino-3-mercapto-3-methylbutanoic acid, useful for stapling/stapled with another amino acid residue to form a staple through the thiol group
  SITE 15: note = C-term amino
XDXXDXXAFCXXXXA

SEQ ID NO: 1095 - protein, 15 aa, synthetic construct
  SITE 1: note = N-term Acetic Acid
  SITE 1: note = (R)-2-allylpyrrolidine-2-carboxylic acid, useful for stapling/stapled with another amino acid residue comprising an olefin group to form a staple through the olefin group
  SITE 3: note = (S)-2-amino-4,4-dimethylpentanoic acid
  VARIANT 4: note = 2-amino-2-(pent-4-en-1-yl)hept-6-enoic acid, useful for stapling/stapled with another amino acid residue comprising an olefin group to form a staple through one of the two olefin groups and/or with another amino acid residue comprising an olefin group to form a staple through the other of the two olefin groups
  SITE 6: note = (S)-3-(2-amino-2-carboxyethyl)benzoic acid
  SITE 7: note = 2-amino-2-methylpropanoic acid
  SITE 10: note = Cysteine, sulfur bonded to position 1 of butane, useful for stapling/stapled with another thiol through position 4 of butane
  SITE 11: note (S)-3-amino-1-((pent-4-en-1-yloxy)carbonyl)pyrrolidine-3-ca rboxylic acid, useful for stapling/stapled with another amino acid residue comprising an olefin group to form a staple through the olefin group
  SITE 12: note = (S)-2-amino-3-(thiophen-3-yl)propanoic acid
  SITE 13: note = (S)-2-amino-3-(benzo[b]thiophen-3-yl)propanoic acid
  SITE 14: note = (R)-2-amino-3-mercapto-3-methylbutanoic acid, useful for stapling/stapled with another amino acid residue to form a staple through the thiol group
  SITE 15: note = C-term amino
XDXXDXXAFCXXXXA

SEQ ID NO: 1096 - protein, 15 aa, synthetic construct
  SITE 1: note = N-term Acetic Acid
  SITE 1: note = (R)-2-allylpyrrolidine-2-carboxylic acid, useful for stapling/stapled with another amino acid residue comprising an olefin group to form a staple through the olefin group
  SITE 3: note = (S)-2-amino-4,4-dimethylpentanoic acid
  VARIANT 4: note = 2-amino-2-(pent-4-en-1-yl)hept-6-enoic acid, useful for stapling/stapled with another amino acid residue comprising an olefin group to form a staple through one of the two olefin groups and/or with another amino acid residue comprising an olefin group to form a staple through the other of the two olefin groups
  SITE 6: note = (S)-3-(2-amino-2-carboxyethyl)benzoic acid
  SITE 7: note = 2-amino-2-methylpropanoic acid
  SITE 10: note = Cysteine, sulfur bonded to position 1 of but-2-ene, useful for stapling/stapled with another thiol through position 4 of but-2-ene
  SITE 11: note (S)-3-amino-1-((pent-4-en-1-yloxy)carbonyl)pyrrolidine-3-ca rboxylic acid, useful for stapling/stapled with another amino acid residue comprising an olefin group to form a staple through the olefin group
  SITE 12: note = (S)-2-amino-3-(thiophen-3-yl)propanoic acid
  SITE 13: note = (S)-2-amino-3-(benzo[b]thiophen-3-yl)propanoic acid
  SITE 14: note = (R)-2-amino-3-mercapto-3-methylbutanoic acid, useful for stapling/stapled with another amino acid residue to form a staple through the thiol group
  SITE 15: note = C-term amino
XDXXDXXAFCXXXXA

SEQ ID NO: 1097 - protein, 15 aa, synthetic construct
  SITE 1: note = N-term Acetic Acid
  SITE 1: note = (R)-2-allylpyrrolidine-2-carboxylic acid, useful for stapling/stapled with another amino acid residue comprising an olefin group to form a staple through the olefin group
  SITE 3: note = (S)-2-amino-4,4-dimethylpentanoic acid
  VARIANT 4: note = 2-amino-2-(pent-4-en-1-yl)hept-6-enoic acid, useful for stapling/stapled with another amino acid residue comprising an olefin group to form a staple through one of the two olefin groups and/or with another amino acid residue comprising an olefin group to form a staple through the other of the two olefin groups
  SITE 6: note = (S)-3-(2-amino-2-carboxyethyl)benzoic acid
  SITE 7: note = 2-amino-2-methylpropanoic acid
  SITE 10: note = Cysteine, sulfur bonded to position 1 of propane, useful for stapling/stapled with another thiol through position 3 of propane
  SITE 11: note (S)-3-amino-1-((pent-4-en-1-yloxy)carbonyl)pyrrolidine-3-ca rboxylic acid, useful for stapling/stapled with another amino acid residue comprising an olefin group to form a staple through the olefin group
  SITE 12: note = (S)-2-amino-3-(thiophen-3-yl)propanoic acid
  SITE 13: note = (S)-2-amino-3-(benzo[b]thiophen-3-yl)propanoic acid
  SITE 14: note = (R)-2-amino-3-mercapto-3-methylbutanoic acid, useful for stapling/stapled with another amino acid residue to form a staple through the thiol group
  SITE 15: note = C-term amino
XDXXDXXAFCXXXXA

SEQ ID NO: 1098 - protein, 15 aa, synthetic construct
  SITE 1: note = N-term Acetic Acid
  SITE 1: note = (R)-2-allylpyrrolidine-2-carboxylic acid, useful for stapling/stapled with another amino acid residue comprising an olefin group to form a staple through the olefin group
  SITE 3: note = (S)-2-amino-4,4-dimethylpentanoic acid
  VARIANT 4: note = 2-amino-2-(pent-4-en-1-yl)hept-6-enoic acid, useful for stapling/stapled with another amino acid residue comprising an olefin group to form a staple through one of the two olefin groups and/or with another amino acid residue comprising an olefin group to form a staple through the other of the two olefin groups
  SITE 6: note = (S)-3-(2-amino-2-carboxyethyl)benzoic acid
  SITE 7: note = 2-amino-2-methylpropanoic acid
  SITE 10: note = (S)-2-amino-4-hydrosulfinylbutanoic acid, sulfur bonded to position 1 of but-2-ene, useful for stapling/stapled with another thiol through position 4 of but-2-ene
  SITE 11: note (S)-3-amino-1-((pent-4-en-1-yloxy)carbonyl)pyrrolidine-3-ca rboxylic acid, useful for stapling/stapled with another amino acid residue comprising an olefin group to form a staple through the olefin group
  SITE 12: note = (S)-2-amino-3-(thiophen-3-yl)propanoic acid
  SITE 13: note = (S)-2-amino-3-(benzo[b]thiophen-3-yl)propanoic acid
  SITE 14: note = (R)-2-amino-3-mercapto-2-methylpropanoic acid, useful for stapling/stapled with another amino acid residue to form a staple through the thiol group
  SITE 15: note = C-term amino
XDXXDXXAFXXXXXA

SEQ ID NO: 1099 - protein, 15 aa, synthetic construct
  SITE 1: note = N-term Acetic Acid
  SITE 1: note = (R)-2-allylpyrrolidine-2-carboxylic acid, useful for stapling/stapled with another amino acid residue comprising an olefin group to form a staple through the olefin group
  SITE 3: note = (S)-2-amino-4,4-dimethylpentanoic acid
  VARIANT 4: note = 2-amino-2-(pent-4-en-1-yl)hept-6-enoic acid, useful for stapling/stapled with another amino acid residue comprising an olefin group to form a staple through one of the two olefin groups and/or with another amino acid residue comprising an olefin group to form a staple through the other of the two olefin groups
  SITE 6: note = (S)-3-(2-amino-2-carboxyethyl)benzoic acid
  SITE 7: note = 2-amino-2-methylpropanoic acid
  SITE 10: note = Cysteine, sulfur bonded to the methyl at position 2 of 2,6-dimethylpyridine, useful for stapling/stapled with another thiol through the methyl position 6 of 2,6-dimethylpyridine
  SITE 11: note (S)-3-amino-1-((pent-4-en-1-yloxy)carbonyl)pyrrolidine-3-ca rboxylic acid, useful for stapling/stapled with another amino acid residue comprising an olefin group to form a staple through the olefin group
  SITE 12: note = (S)-2-amino-3-(thiophen-3-yl)propanoic acid
  SITE 13: note = (S)-2-amino-3-(benzo[b]thiophen-3-yl)propanoic acid
  SITE 14: note = L-homocysteine
  SITE 15: note = C-term amino
XDXXDXXAFCXXXCA

SEQ ID NO: 1100 - protein, 15 aa, synthetic construct
  SITE 1: note = N-term Acetic Acid
  SITE 1: note = (R)-2-allylpyrrolidine-2-carboxylic acid, useful for stapling/stapled with another amino acid residue comprising an olefin group to form a staple through the olefin group
  SITE 3: note = (S)-2-amino-4,4-dimethylpentanoic acid
  VARIANT 4: note = 2-amino-2-(pent-4-en-1-yl)hept-6-enoic acid, useful for stapling/stapled with another amino acid residue comprising an olefin group to form a staple through one of the two olefin groups and/or with another amino acid residue comprising an olefin group to form a staple through the other of the two olefin groups
  SITE 6: note = (S)-3-(2-amino-2-carboxyethyl)benzoic acid
  SITE 7: note = 2-amino-2-methylpropanoic acid
  SITE 10: note = Cysteine, sulfur bonded to position 1 of but-2-ene, useful for stapling/stapled with another thiol through position 4 of but-2-ene
  SITE 11: note (S)-3-amino-1-((pent-4-en-1-yloxy)carbonyl)pyrrolidine-3-ca rboxylic acid, useful for stapling/stapled with another amino acid residue comprising an olefin group to form a staple through the olefin group
  SITE 12: note = (S)-2-amino-3-(thiophen-3-yl)propanoic acid
  SITE 13: note = (S)-2-amino-3-(benzo[b]thiophen-3-yl)propanoic acid
  SITE 14: note = L-homocysteine
  SITE 15: note = C-term amino
XDXXDXXAFCXXXCA

SEQ ID NO: 1101 - protein, 15 aa, synthetic construct
  SITE 1: note = N-term Acetic Acid
  SITE 1: note = (S)-2-amino-2-methylhept-6-enoic acid, useful for stapling/stapled with another amino acid residue comprising an olefin group to form a staple through the olefin group
  SITE 4: note = (S)-2-amino-4,4-dimethylpentanoic acid
  VARIANT 5: note = 2-amino-2-(pent-4-en-1-yl)hept-6-enoic acid, useful for stapling/stapled with another amino acid residue comprising an olefin group to form a staple through one of the two olefin groups and/or with another amino acid residue comprising an olefin group to form a staple through the other of the two olefin groups
  SITE 7: note = (S)-3-(2-amino-2-carboxyethyl)benzoic acid
  SITE 8: note = 2-amino-2-methylpropanoic acid
  SITE 11: note = L-lysine, useful for stapling/stapled with another amino acid residue comprising a side chain acid group to form a staple through the 6-amino group
  SITE 12: note (S)-3-amino-1-((pent-4-en-1-yloxy)carbonyl)pyrrolidine-3-ca rboxylic acid, useful for stapling/stapled with another amino acid residue comprising an olefin group to form a staple through the olefin group
  SITE 14: note = (S)-2-amino-3-(3,4-dichlorophenyl)propanoic acid
  SITE 15: note = L-glutamic acid, useful for stapling/stapled with another amino acid residue comprising a side chain amino group to form a staple through the 4-carboxyl group
  SITE 15: note = C-term amino
XEDXXDXXAFKXFXE

SEQ ID NO: 1102 - protein, 15 aa, synthetic construct
  SITE 1: note = N-term Acetic Acid
  SITE 1: note = (S)-2-amino-2-methyloct-7-enoic acid, useful for stapling/stapled with another amino acid residue comprising an olefin group to form a staple through the olefin group
  SITE 4: note = (S)-2-amino-4,4-dimethylpentanoic acid
  VARIANT 5: note = 2-amino-2-(pent-4-en-1-yl)hept-6-enoic acid, useful for stapling/stapled with another amino acid residue comprising an olefin group to form a staple through one of the two olefin groups and/or with another amino acid residue comprising an olefin group to form a staple through the other of the two olefin groups
  SITE 7: note = (S)-3-(2-amino-2-carboxyethyl)benzoic acid
  SITE 8: note = 2-amino-2-methylpropanoic acid
  SITE 11: note = L-lysine, useful for stapling/stapled with another amino acid residue comprising a side chain acid group to form a staple through the 6-amino group
  SITE 12: note (S)-3-amino-1-((pent-4-en-1-yloxy)carbonyl)pyrrolidine-3-ca rboxylic acid, useful for stapling/stapled with another amino acid residue comprising an olefin group to form a staple through the olefin group
  SITE 14: note = (S)-2-amino-3-(3,4-dichlorophenyl)propanoic acid
  SITE 15: note = L-glutamic acid, useful for stapling/stapled with another amino acid residue comprising a side chain amino group to form a staple through the 4-carboxyl group
  SITE 15: note = C-term amino
XVDXXDXXAFKXFXE

SEQ ID NO: 1103 - protein, 15 aa, synthetic construct
  SITE 1: note = N-term Acetic Acid
  SITE 1: note = (S)-2-amino-2-methylhept-6-enoic acid, useful for stapling/stapled with another amino acid residue comprising an olefin group to form a staple through the olefin group
  SITE 4: note = (S)-2-amino-4,4-dimethylpentanoic acid
  VARIANT 5: note = 2-amino-2-(pent-4-en-1-yl)hept-6-enoic acid, useful for stapling/stapled with another amino acid residue comprising an olefin group to form a staple through one of the two olefin groups and/or with another amino acid residue comprising an olefin group to form a staple through the other of the two olefin groups
  SITE 7: note = (S)-3-(2-amino-2-carboxyethyl)benzoic acid
  SITE 8: note = 2-amino-2-methylpropanoic acid
  SITE 11: note = L-lysine, useful for stapling/stapled with another amino acid residue comprising a side chain acid group to form a staple through the 6-amino group
  SITE 12: note (S)-3-amino-1-((pent-4-en-1-yloxy)carbonyl)pyrrolidine-3-ca rboxylic acid, useful for stapling/stapled with another amino acid residue comprising an olefin group to form a staple through the olefin group
  SITE 14: note = (S)-2-amino-3-(3,4-dichlorophenyl)propanoic acid
  SITE 15: note = L-glutamic acid, useful for stapling/stapled with another amino acid residue comprising a side chain amino group to form a staple through the 4-carboxyl group
  SITE 15: note = C-term amino
XVDXXDXXAFKXFXE

SEQ ID NO: 1104 - protein, 15 aa, synthetic construct
  SITE 1: note = N-term Acetic Acid
  SITE 1: note = (S)-2-amino-2-methyloct-7-enoic acid, useful for stapling/stapled with another amino acid residue comprising an olefin group to form a staple through the olefin group
  SITE 4: note = (S)-2-amino-4,4-dimethylpentanoic acid
  VARIANT 5: note = 2-amino-2-(pent-4-en-1-yl)hept-6-enoic acid, useful for stapling/stapled with another amino acid residue comprising an olefin group to form a staple through one of the two olefin groups and/or with another amino acid residue comprising an olefin group to form a staple through the other of the two olefin groups
  SITE 7: note = (S)-3-(2-amino-2-carboxyethyl)benzoic acid
  SITE 8: note = 2-amino-2-methylpropanoic acid
  SITE 11: note = L-lysine, useful for stapling/stapled with another amino acid residue comprising a side chain acid group to form a staple through the 6-amino group
  SITE 12: note (S)-3-amino-1-((pent-4-en-1-yloxy)carbonyl)pyrrolidine-3-ca rboxylic acid, useful for stapling/stapled with another amino acid residue comprising an olefin group to form a staple through the olefin group
  SITE 14: note = (S)-2-amino-3-(3,4-dichlorophenyl)propanoic acid
  SITE 15: note = L-glutamic acid, useful for stapling/stapled with another amino acid residue comprising a side chain amino group to form a staple through the 4-carboxyl group
  SITE 15: note = C-term amino
XEDXXDXXAFKXFXE

SEQ ID NO: 1105 - protein, 15 aa, synthetic construct
  SITE 1: note = N-term Acetic Acid
  SITE 1: note = (S)-2-amino-2-methyloct-7-enoic acid, useful for stapling/stapled with another amino acid residue comprising an olefin group to form a staple through the olefin group
  SITE 4: note = (S)-2-amino-4,4-dimethylpentanoic acid
  VARIANT 5: note = 2-amino-2-(pent-4-en-1-yl)hept-6-enoic acid, useful for stapling/stapled with another amino acid residue comprising an olefin group to form a staple through one of the two olefin groups and/or with another amino acid residue comprising an olefin group to form a staple through the other of the two olefin groups
  SITE 7: note = (S)-3-(2-amino-2-carboxyethyl)benzoic acid
  SITE 8: note = 2-amino-2-methylpropanoic acid
  SITE 11: note = L-lysine, useful for stapling/stapled with another amino acid residue comprising a side chain acid group to form a staple through the 6-amino group
  SITE 12: note (S)-3-amino-1-((pent-4-en-1-yloxy)carbonyl)pyrrolidine-3-ca rboxylic acid, useful for stapling/stapled with another amino acid residue comprising an olefin group to form a staple through the olefin group
  SITE 14: note = (S)-2-amino-3-(3,4-dichlorophenyl)propanoic acid
  SITE 15: note = L-glutamic acid, useful for stapling/stapled with another amino acid residue comprising a side chain amino group to form a staple through the 4-carboxyl group
  SITE 15: note = C-term amino
XADXXDXXAFKXFXE

SEQ ID NO: 1106 - protein, 15 aa, synthetic construct
  SITE 1: note = N-term Acetic Acid
  SITE 1: note = (R)-2-allylpyrrolidine-2-carboxylic acid, useful for stapling/stapled with another amino acid residue comprising an olefin group to form a staple through the olefin group
  SITE 3: note = (S)-2-amino-4,4-dimethylpentanoic acid
  VARIANT 4: note = 2-amino-2-(pent-4-en-1-yl)hept-6-enoic acid, useful for stapling/stapled with another amino acid residue comprising an olefin group to form a staple through one of the two olefin groups and/or with another amino acid residue comprising an olefin group to form a staple through the other of the two olefin groups
  SITE 6: note = (S)-3-(2-amino-2-carboxyethyl)benzoic acid
  SITE 7: note = 2-amino-2-methylpropanoic acid
  SITE 10: note = L-homocysteine, sulfur bonded to the methyl at position 2 of 2,6-dimethylpyridine, useful for stapling/stapled with another thiol through the methyl position 6 of 2,6-dimethylpyridine
  SITE 11: note (S)-3-amino-1-((pent-4-en-1-yloxy)carbonyl)pyrrolidine-3-ca rboxylic acid, useful for stapling/stapled with another amino acid residue comprising an olefin group to form a staple through the olefin group
  SITE 12: note = (S)-2-amino-3-(thiophen-3-yl)propanoic acid
  SITE 13: note = (S)-2-amino-3-(benzo[b]thiophen-3-yl)propanoic acid
  SITE 14: note = (R)-2-amino-3-mercapto-3-methylbutanoic acid, useful for stapling/stapled with another amino acid residue to form a staple through the thiol group
  SITE 15: note = C-term amino
XDXXDXXAFCXXXXA

SEQ ID NO: 1107 - protein, 15 aa, synthetic construct
  SITE 1: note = N-term Acetic Acid
  SITE 1: note = (R)-2-allylpyrrolidine-2-carboxylic acid, useful for stapling/stapled with another amino acid residue comprising an olefin group to form a staple through the olefin group
  SITE 3: note = (S)-2-amino-4,4-dimethylpentanoic acid
  VARIANT 4: note = 2-amino-2-(pent-4-en-1-yl)hept-6-enoic acid, useful for stapling/stapled with another amino acid residue comprising an olefin group to form a staple through one of the two olefin groups and/or with another amino acid residue comprising an olefin group to form a staple through the other of the two olefin groups
  SITE 6: note = (S)-3-(2-amino-2-carboxyethyl)benzoic acid
  SITE 7: note = 2-amino-2-methylpropanoic acid
  SITE 10: note = L-homocysteine, sulfur bonded to the methyl at position 3 of 3,5-dimethylpyridine, useful for stapling/stapled with another thiol through the methyl at position 5 of 3,5-dimethylpyridine
  SITE 11: note (S)-3-amino-1-((pent-4-en-1-yloxy)carbonyl)pyrrolidine-3-ca rboxylic acid, useful for stapling/stapled with another amino acid residue comprising an olefin group to form a staple through the olefin group
  SITE 12: note = (S)-2-amino-3-(thiophen-3-yl)propanoic acid
  SITE 13: note = (S)-2-amino-3-(benzo[b]thiophen-3-yl)propanoic acid
  SITE 14: note = (R)-2-amino-3-mercapto-3-methylbutanoic acid, useful for stapling/stapled with another amino acid residue to form a staple through the thiol group
  SITE 15: note = C-term amino
XDXXDXXAFCXXXXA

SEQ ID NO: 1108 - protein, 15 aa, synthetic construct
  SITE 1: note = N-term Acetic Acid
  SITE 1: note = (R)-2-allylpyrrolidine-2-carboxylic acid, useful for stapling/stapled with another amino acid residue comprising an olefin group to form a staple through the olefin group
  SITE 3: note = (S)-2-amino-4,4-dimethylpentanoic acid
  VARIANT 4: note = 2-amino-2-(pent-4-en-1-yl)hept-6-enoic acid, useful for stapling/stapled with another amino acid residue comprising an olefin group to form a staple through one of the two olefin groups and/or with another amino acid residue comprising an olefin group to form a staple through the other of the two olefin groups
  SITE 6: note = (S)-3-(2-amino-2-carboxyethyl)benzoic acid
  SITE 7: note = 2-amino-2-methylpropanoic acid
  SITE 10: note = L-homocysteine, sulfur bonded to position 1 of propane, useful for stapling/stapled with another thiol through position 3 of propane
  SITE 11: note (S)-3-amino-1-((pent-4-en-1-yloxy)carbonyl)pyrrolidine-3-ca rboxylic acid, useful for stapling/stapled with another amino acid residue comprising an olefin group to form a staple through the olefin group
  SITE 12: note = (S)-2-amino-3-(thiophen-3-yl)propanoic acid
  SITE 13: note = (S)-2-amino-3-(benzo[b]thiophen-3-yl)propanoic acid
  SITE 14: note = (R)-2-amino-3-mercapto-3-methylbutanoic acid, useful for stapling/stapled with another amino acid residue to form a staple through the thiol group
  SITE 15: note = C-term amino
XDXXDXXAFCXXXXA

SEQ ID NO: 1109 - protein, 17 aa, synthetic construct
  SITE 1: note = N-term Acetic Acid
  SITE 1: note = (R)-2-allylpyrrolidine-2-carboxylic acid, useful for stapling/stapled with another amino acid residue comprising an olefin group to form a staple through the olefin group
  SITE 3: note = (S)-2-amino-4,4-dimethylpentanoic acid
  VARIANT 4: note = 2-amino-2-(pent-4-en-1-yl)hept-6-enoic acid, useful for stapling/stapled with another amino acid residue comprising an olefin group to form a staple through one of the two olefin groups and/or with another amino acid residue comprising an olefin group to form a staple through the other of the two olefin groups
  SITE 6: note = (S)-3-(2-amino-2-carboxyethyl)benzoic acid
  SITE 7: note = 2-amino-2-methylpropanoic acid
  SITE 10: note = L-lysine, useful for stapling/stapled with another amino acid residue comprising a side chain acid group to form a staple through the 6-amino group
  SITE 11: note (S)-3-amino-1-((pent-4-en-1-yloxy)carbonyl)pyrrolidine-3-ca rboxylic acid, useful for stapling/stapled with another amino acid residue comprising an olefin group to form a staple through the olefin group
  SITE 12: note = (S)-2-amino-3-(thiophen-3-yl)propanoic acid
  SITE 13: note = (S)-2-amino-3-(benzo[b]thiophen-3-yl)propanoic acid
  SITE 14: note = L-glutamic acid, useful for stapling/stapled with another amino acid residue comprising a side chain amino group to form a staple through the 4-carboxyl group
  SITE 17: note = C-term amino
XDXXDXXAFKXXXETSA

SEQ ID NO: 1110 - protein, 17 aa, synthetic construct
  SITE 1: note = N-term Acetic Acid
  SITE 1: note = (R)-2-allylpyrrolidine-2-carboxylic acid, useful for stapling/stapled with another amino acid residue comprising an olefin group to form a staple through the olefin group
  SITE 3: note = (S)-2-amino-4,4-dimethylpentanoic acid
  VARIANT 4: note = 2-amino-2-(pent-4-en-1-yl)hept-6-enoic acid, useful for stapling/stapled with another amino acid residue comprising an olefin group to form a staple through one of the two olefin groups and/or with another amino acid residue comprising an olefin group to form a staple through the other of the two olefin groups
  SITE 6: note = (S)-3-(2-amino-2-carboxyethyl)benzoic acid
  SITE 7: note = 2-amino-2-methylpropanoic acid
  SITE 10: note = L-lysine, useful for stapling/stapled with another amino acid residue comprising a side chain acid group to form a staple through the 6-amino group
  SITE 11: note (S)-3-amino-1-((pent-4-en-1-yloxy)carbonyl)pyrrolidine-3-ca rboxylic acid, useful for stapling/stapled with another amino acid residue comprising an olefin group to form a staple through the olefin group
  SITE 12: note = (S)-2-amino-3-(thiophen-3-yl)propanoic acid
  SITE 13: note = (S)-2-amino-3-(benzo[b]thiophen-3-yl)propanoic acid
  SITE 14: note = L-glutamic acid, useful for stapling/stapled with another amino acid residue comprising a side chain amino group to form a staple through the 4-carboxyl group
  SITE 17: note = C-term amino
XDXXDXXAFKXXXETSL

SEQ ID NO: 1111 - protein, 18 aa, synthetic construct
  SITE 1: note = N-term Acetic Acid
  SITE 1: note = (R)-2-allylpyrrolidine-2-carboxylic acid, useful for stapling/stapled with another amino acid residue comprising an olefin group to form a staple through the olefin group
  SITE 3: note = (S)-2-amino-4,4-dimethylpentanoic acid
  VARIANT 4: note = 2-amino-2-(pent-4-en-1-yl)hept-6-enoic acid, useful for stapling/stapled with another amino acid residue comprising an olefin group to form a staple through one of the two olefin groups and/or with another amino acid residue comprising an olefin group to form a staple through the other of the two olefin groups
  SITE 6: note = (S)-3-(2-amino-2-carboxyethyl)benzoic acid
  SITE 7: note = 2-amino-2-methylpropanoic acid
  SITE 10: note = L-lysine, useful for stapling/stapled with another amino acid residue comprising a side chain acid group to form a staple through the 6-amino group
  SITE 11: note (S)-3-amino-1-((pent-4-en-1-yloxy)carbonyl)pyrrolidine-3-ca rboxylic acid, useful for stapling/stapled with another amino acid residue comprising an olefin group to form a staple through the olefin group
  SITE 12: note = (S)-2-amino-3-(thiophen-3-yl)propanoic acid
  SITE 13: note = (S)-2-amino-3-(benzo[b]thiophen-3-yl)propanoic acid
  SITE 14: note = L-glutamic acid, useful for stapling/stapled with another amino acid residue comprising a side chain amino group to form a staple through the 4-carboxyl group
  SITE 18: note = C-term amino
XDXXDXXAFKXXXETSLP

SEQ ID NO: 1112 - protein, 17 aa, synthetic construct
  SITE 1: note = N-term Acetic Acid
  SITE 1: note = (R)-2-allylpyrrolidine-2-carboxylic acid, useful for stapling/stapled with another amino acid residue comprising an olefin group to form a staple through the olefin group
  SITE 3: note = (S)-2-amino-4,4-dimethylpentanoic acid
  VARIANT 4: note = 2-amino-2-(pent-4-en-1-yl)hept-6-enoic acid, useful for stapling/stapled with another amino acid residue comprising an olefin group to form a staple through one of the two olefin groups and/or with another amino acid residue comprising an olefin group to form a staple through the other of the two olefin groups
  SITE 6: note = (S)-3-(2-amino-2-carboxyethyl)benzoic acid
  SITE 7: note = 2-amino-2-methylpropanoic acid
  SITE 10: note = L-lysine, useful for stapling/stapled with another amino acid residue comprising a side chain acid group to form a staple through the 6-amino group
  SITE 11: note (S)-3-amino-1-((pent-4-en-1-yloxy)carbonyl)pyrrolidine-3-ca rboxylic acid, useful for stapling/stapled with another amino acid residue comprising an olefin group to form a staple through the olefin group
  SITE 12: note = (S)-2-amino-3-(thiophen-3-yl)propanoic acid
  SITE 13: note = (S)-2-amino-3-(benzo[b]thiophen-3-yl)propanoic acid
  SITE 14: note = L-glutamic acid, useful for stapling/stapled with another amino acid residue comprising a side chain amino group to form a staple through the 4-carboxyl group
  SITE 17: note = C-term amino
XDXXDXXAFKXXXETST

SEQ ID NO: 1113 - protein, 18 aa, synthetic construct
  SITE 1: note = N-term Acetic Acid
  SITE 1: note = (R)-2-allylpyrrolidine-2-carboxylic acid, useful for stapling/stapled with another amino acid residue comprising an olefin group to form a staple through the olefin group
  SITE 3: note = (S)-2-amino-4,4-dimethylpentanoic acid
  VARIANT 4: note = 2-amino-2-(pent-4-en-1-yl)hept-6-enoic acid, useful for stapling/stapled with another amino acid residue comprising an olefin group to form a staple through one of the two olefin groups and/or with another amino acid residue comprising an olefin group to form a staple through the other of the two olefin groups
  SITE 6: note = (S)-3-(2-amino-2-carboxyethyl)benzoic acid
  SITE 7: note = 2-amino-2-methylpropanoic acid
  SITE 10: note = L-lysine, useful for stapling/stapled with another amino acid residue comprising a side chain acid group to form a staple through the 6-amino group
  SITE 11: note (S)-3-amino-1-((pent-4-en-1-yloxy)carbonyl)pyrrolidine-3-ca rboxylic acid, useful for stapling/stapled with another amino acid residue comprising an olefin group to form a staple through the olefin group
  SITE 12: note = (S)-2-amino-3-(thiophen-3-yl)propanoic acid
  SITE 13: note = (S)-2-amino-3-(benzo[b]thiophen-3-yl)propanoic acid
  SITE 14: note = L-glutamic acid, useful for stapling/stapled with another amino acid residue comprising a side chain amino group to form a staple through the 4-carboxyl group
  SITE 18: note = C-term amino
XDXXDXXAFKXXXETSTP

SEQ ID NO: 1114 - protein, 17 aa, synthetic construct
  SITE 1: note = N-term Acetic Acid
  SITE 1: note = (R)-2-allylpyrrolidine-2-carboxylic acid, useful for stapling/stapled with another amino acid residue comprising an olefin group to form a staple through the olefin group
  SITE 3: note = (S)-2-amino-4,4-dimethylpentanoic acid
  VARIANT 4: note = 2-amino-2-(pent-4-en-1-yl)hept-6-enoic acid, useful for stapling/stapled with another amino acid residue comprising an olefin group to form a staple through one of the two olefin groups and/or with another amino acid residue comprising an olefin group to form a staple through the other of the two olefin groups
  SITE 6: note = (S)-3-(2-amino-2-carboxyethyl)benzoic acid
  SITE 7: note = 2-amino-2-methylpropanoic acid
  SITE 10: note = L-lysine, useful for stapling/stapled with another amino acid residue comprising a side chain acid group to form a staple through the 6-amino group
  SITE 11: note (S)-3-amino-1-((pent-4-en-1-yloxy)carbonyl)pyrrolidine-3-ca rboxylic acid, useful for stapling/stapled with another amino acid residue comprising an olefin group to form a staple through the olefin group
  SITE 12: note = (S)-2-amino-3-(thiophen-3-yl)propanoic acid
  SITE 13: note = (S)-2-amino-3-(benzo[b]thiophen-3-yl)propanoic acid
  SITE 14: note = L-glutamic acid, useful for stapling/stapled with another amino acid residue comprising a side chain amino group to form a staple through the 4-carboxyl group
  SITE 17: note = C-term amino
XDXXDXXAFKXXXETSP

SEQ ID NO: 1115 - protein, 17 aa, synthetic construct
  SITE 1: note = N-term Acetic Acid
  SITE 1: note = (R)-2-allylpyrrolidine-2-carboxylic acid, useful for stapling/stapled with another amino acid residue comprising an olefin group to form a staple through the olefin group
  SITE 3: note = (S)-2-amino-4,4-dimethylpentanoic acid
  VARIANT 4: note = 2-amino-2-(pent-4-en-1-yl)hept-6-enoic acid, useful for stapling/stapled with another amino acid residue comprising an olefin group to form a staple through one of the two olefin groups and/or with another amino acid residue comprising an olefin group to form a staple through the other of the two olefin groups
  SITE 6: note = (S)-3-(2-amino-2-carboxyethyl)benzoic acid
  SITE 7: note = 2-amino-2-methylpropanoic acid
  SITE 10: note = L-lysine, useful for stapling/stapled with another amino acid residue comprising a side chain acid group to form a staple through the 6-amino group
  SITE 11: note (S)-3-amino-1-((pent-4-en-1-yloxy)carbonyl)pyrrolidine-3-ca rboxylic acid, useful for stapling/stapled with another amino acid residue comprising an olefin group to form a staple through the olefin group
  SITE 12: note = (S)-2-amino-3-(thiophen-3-yl)propanoic acid
  SITE 13: note = (S)-2-amino-3-(benzo[b]thiophen-3-yl)propanoic acid
  SITE 14: note = L-glutamic acid, useful for stapling/stapled with another amino acid residue comprising a side chain amino group to form a staple through the 4-carboxyl group
  SITE 17: note = C-term amino
XDXXDXXAFKXXXEVSA

SEQ ID NO: 1116 - protein, 17 aa, synthetic construct
  SITE 1: note = N-term Acetic Acid
  SITE 1: note = (R)-2-allylpyrrolidine-2-carboxylic acid, useful for stapling/stapled with another amino acid residue comprising an olefin group to form a staple through the olefin group
  SITE 3: note = (S)-2-amino-4,4-dimethylpentanoic acid
  VARIANT 4: note = 2-amino-2-(pent-4-en-1-yl)hept-6-enoic acid, useful for stapling/stapled with another amino acid residue comprising an olefin group to form a staple through one of the two olefin groups and/or with another amino acid residue comprising an olefin group to form a staple through the other of the two olefin groups
  SITE 6: note = (S)-3-(2-amino-2-carboxyethyl)benzoic acid
  SITE 7: note = 2-amino-2-methylpropanoic acid
  SITE 10: note = L-lysine, useful for stapling/stapled with another amino acid residue comprising a side chain acid group to form a staple through the 6-amino group
  SITE 11: note (S)-3-amino-1-((pent-4-en-1-yloxy)carbonyl)pyrrolidine-3-ca rboxylic acid, useful for stapling/stapled with another amino acid residue comprising an olefin group to form a staple through the olefin group
  SITE 12: note = (S)-2-amino-3-(thiophen-3-yl)propanoic acid
  SITE 13: note = (S)-2-amino-3-(benzo[b]thiophen-3-yl)propanoic acid
  SITE 14: note = L-glutamic acid, useful for stapling/stapled with another amino acid residue comprising a side chain amino group to form a staple through the 4-carboxyl group
  SITE 17: note = C-term amino
XDXXDXXAFKXXXEVSL

SEQ ID NO: 1117 - protein, 18 aa, synthetic construct
  SITE 1: note = N-term Acetic Acid
  SITE 1: note = (R)-2-allylpyrrolidine-2-carboxylic acid, useful for stapling/stapled with another amino acid residue comprising an olefin group to form a staple through the olefin group
  SITE 3: note = (S)-2-amino-4,4-dimethylpentanoic acid
  VARIANT 4: note = 2-amino-2-(pent-4-en-1-yl)hept-6-enoic acid, useful for stapling/stapled with another amino acid residue comprising an olefin group to form a staple through one of the two olefin groups and/or with another amino acid residue comprising an olefin group to form a staple through the other of the two olefin groups
  SITE 6: note = (S)-3-(2-amino-2-carboxyethyl)benzoic acid
  SITE 7: note = 2-amino-2-methylpropanoic acid
  SITE 10: note = L-lysine, useful for stapling/stapled with another amino acid residue comprising a side chain acid group to form a staple through the 6-amino group
  SITE 11: note (S)-3-amino-1-((pent-4-en-1-yloxy)carbonyl)pyrrolidine-3-ca rboxylic acid, useful for stapling/stapled with another amino acid residue comprising an olefin group to form a staple through the olefin group
  SITE 12: note = (S)-2-amino-3-(thiophen-3-yl)propanoic acid
  SITE 13: note = (S)-2-amino-3-(benzo[b]thiophen-3-yl)propanoic acid
  SITE 14: note = L-glutamic acid, useful for stapling/stapled with another amino acid residue comprising a side chain amino group to form a staple through the 4-carboxyl group
  SITE 18: note = C-term amino
XDXXDXXAFKXXXEVSLP

SEQ ID NO: 1118 - protein, 17 aa, synthetic construct
  SITE 1: note = N-term Acetic Acid
  SITE 1: note = (R)-2-allylpyrrolidine-2-carboxylic acid, useful for stapling/stapled with another amino acid residue comprising an olefin group to form a staple through the olefin group
  SITE 3: note = (S)-2-amino-4,4-dimethylpentanoic acid
  VARIANT 4: note = 2-amino-2-(pent-4-en-1-yl)hept-6-enoic acid, useful for stapling/stapled with another amino acid residue comprising an olefin group to form a staple through one of the two olefin groups and/or with another amino acid residue comprising an olefin group to form a staple through the other of the two olefin groups
  SITE 6: note = (S)-3-(2-amino-2-carboxyethyl)benzoic acid
  SITE 7: note = 2-amino-2-methylpropanoic acid
  SITE 10: note = L-lysine, useful for stapling/stapled with another amino acid residue comprising a side chain acid group to form a staple through the 6-amino group
  SITE 11: note (S)-3-amino-1-((pent-4-en-1-yloxy)carbonyl)pyrrolidine-3-ca rboxylic acid, useful for stapling/stapled with another amino acid residue comprising an olefin group to form a staple through the olefin group
  SITE 12: note = (S)-2-amino-3-(thiophen-3-yl)propanoic acid
  SITE 13: note = (S)-2-amino-3-(benzo[b]thiophen-3-yl)propanoic acid
  SITE 14: note = L-glutamic acid, useful for stapling/stapled with another amino acid residue comprising a side chain amino group to form a staple through the 4-carboxyl group
  SITE 17: note = C-term amino
XDXXDXXAFKXXXEVST

SEQ ID NO: 1119 - protein, 18 aa, synthetic construct
  SITE 1: note = N-term Acetic Acid
  SITE 1: note = (R)-2-allylpyrrolidine-2-carboxylic acid, useful for stapling/stapled with another amino acid residue comprising an olefin group to form a staple through the olefin group
  SITE 3: note = (S)-2-amino-4,4-dimethylpentanoic acid
  VARIANT 4: note = 2-amino-2-(pent-4-en-1-yl)hept-6-enoic acid, useful for stapling/stapled with another amino acid residue comprising an olefin group to form a staple through one of the two olefin groups and/or with another amino acid residue comprising an olefin group to form a staple through the other of the two olefin groups
  SITE 6: note = (S)-3-(2-amino-2-carboxyethyl)benzoic acid
  SITE 7: note = 2-amino-2-methylpropanoic acid
  SITE 10: note = L-lysine, useful for stapling/stapled with another amino acid residue comprising a side chain acid group to form a staple through the 6-amino group
  SITE 11: note (S)-3-amino-1-((pent-4-en-1-yloxy)carbonyl)pyrrolidine-3-ca rboxylic acid, useful for stapling/stapled with another amino acid residue comprising an olefin group to form a staple through the olefin group
  SITE 12: note = (S)-2-amino-3-(thiophen-3-yl)propanoic acid
  SITE 13: note = (S)-2-amino-3-(benzo[b]thiophen-3-yl)propanoic acid
  SITE 14: note = L-glutamic acid, useful for stapling/stapled with another amino acid residue comprising a side chain amino group to form a staple through the 4-carboxyl group
  SITE 18: note = C-term amino
XDXXDXXAFKXXXEVSTP

SEQ ID NO: 1120 - protein, 17 aa, synthetic construct
  SITE 1: note = N-term Acetic Acid
  SITE 1: note = (R)-2-allylpyrrolidine-2-carboxylic acid, useful for stapling/stapled with another amino acid residue comprising an olefin group to form a staple through the olefin group
  SITE 3: note = (S)-2-amino-4,4-dimethylpentanoic acid
  VARIANT 4: note = 2-amino-2-(pent-4-en-1-yl)hept-6-enoic acid, useful for stapling/stapled with another amino acid residue comprising an olefin group to form a staple through one of the two olefin groups and/or with another amino acid residue comprising an olefin group to form a staple through the other of the two olefin groups
  SITE 6: note = (S)-3-(2-amino-2-carboxyethyl)benzoic acid
  SITE 7: note = 2-amino-2-methylpropanoic acid
  SITE 10: note = L-lysine, useful for stapling/stapled with another amino acid residue comprising a side chain acid group to form a staple through the 6-amino group
  SITE 11: note (S)-3-amino-1-((pent-4-en-1-yloxy)carbonyl)pyrrolidine-3-ca rboxylic acid, useful for stapling/stapled with another amino acid residue comprising an olefin group to form a staple through the olefin group
  SITE 12: note = (S)-2-amino-3-(thiophen-3-yl)propanoic acid
  SITE 13: note = (S)-2-amino-3-(benzo[b]thiophen-3-yl)propanoic acid
  SITE 14: note = L-glutamic acid, useful for stapling/stapled with another amino acid residue comprising a side chain amino group to form a staple through the 4-carboxyl group
  SITE 17: note = C-term amino
XDXXDXXAFKXXXEVSP

SEQ ID NO: 1121 - protein, 15 aa, synthetic construct
  SITE 1: note = N-term Acetic Acid
  SITE 1: note = (R)-2-allylpyrrolidine-2-carboxylic acid, useful for stapling/stapled with another amino acid residue comprising an olefin group to form a staple through the olefin group
  SITE 3: note = (R)-2-amino-2-methylhept-6-enoic acid, useful for stapling/stapled with another amino acid residue comprising an olefin group to form a staple through the olefin group
  SITE 4: note = (S)-2-amino-2-methylhept-6-enoic acid, useful for stapling/stapled with another amino acid residue comprising an olefin group to form a staple through the olefin group
  SITE 6: note = (S)-3-(2-amino-2-carboxyethyl)benzoic acid
  SITE 7: note = 2-amino-2-methylpropanoic acid
  SITE 10: note (S)-3-amino-1-((pent-4-en-1-yloxy)carbonyl)pyrrolidine-3-ca rboxylic acid, useful for stapling/stapled with another amino acid residue comprising an olefin group to form a staple through the olefin group
  SITE 11: note = L-lysine, useful for stapling/stapled with another amino acid residue comprising a side chain acid group to form a staple through the 6-amino group
  SITE 12: note = (S)-2-amino-3-(thiophen-3-yl)propanoic acid
  SITE 13: note = (S)-2-amino-3-(benzo[b]thiophen-3-yl)propanoic acid
  SITE 15: note = L-glutamic acid, useful for stapling/stapled with another amino acid residue comprising a side chain amino group to form a staple through the 4-carboxyl group
  SITE 15: note = C-term amino
XDXXDXXAFXKXXAE

SEQ ID NO: 1122 - protein, 14 aa, synthetic construct
  SITE 1: note = N-term (R)-2-methyl-2-(2-oxopyrrolidin-1-yl)pent-4-enoic acid, useful for stapling/stapled with another amino acid residue comprising an olefin group to form a staple through the olefin group
  SITE 2: note = (S)-2-amino-4,4-dimethylpentanoic acid
  VARIANT 3: note = 2-amino-2-(but-3-en-1-yl)hex-5-enoic acid, useful for stapling/stapled with another amino acid residue comprising an olefin group to form a staple through one of the two olefin groups and/or with another amino acid residue comprising an olefin group to form a staple through the other of the two olefin groups
  SITE 5: note = (S)-3-(2-amino-2-carboxyethyl)benzoic acid
  SITE 6: note = 2-amino-2-methylpropanoic acid
  SITE 9: note = L-lysine, useful for stapling/stapled with another amino acid residue comprising a side chain acid group to form a staple through the 6-amino group
  SITE 10: note (S)-3-amino-1-((hex-5-en-1-yloxy)carbonyl)pyrrolidine-3-car boxylic acid, useful for stapling/stapled with another amino acid residue comprising an olefin group to form a staple through the olefin group
  SITE 11: note = (S)-2-amino-3-(thiophen-3-yl)propanoic acid
  SITE 12: note = (S)-2-amino-3-(benzo[b]thiophen-3-yl)propanoic acid
  SITE 13: note = L-glutamic acid, useful for stapling/stapled with another amino acid residue comprising a side chain amino group to form a staple through the 4-carboxyl group
  SITE 14: note = C-term amino
DXXDXXAFKXXXEA

SEQ ID NO: 1123 - protein, 14 aa, synthetic construct
  SITE 1: note = N-term (R)-2-methyl-2-(2-oxopyrrolidin-1-yl)pent-4-enoic acid, useful for stapling/stapled with another amino acid residue comprising an olefin group to form a staple through the olefin group
  SITE 2: note = (S)-2-amino-4,4-dimethylpentanoic acid
  VARIANT 3: note = 2-amino-2-(pent-4-en-1-yl)hept-6-enoic acid, useful for stapling/stapled with another amino acid residue comprising an olefin group to form a staple through one of the two olefin groups and/or with another amino acid residue comprising an olefin group to form a staple through the other of the two olefin groups
  SITE 5: note = (S)-3-(2-amino-2-carboxyethyl)benzoic acid
  SITE 6: note = 2-amino-2-methylpropanoic acid
  SITE 9: note = L-lysine, useful for stapling/stapled with another amino acid residue comprising a side chain acid group to form a staple through the 6-amino group
  SITE 10: note (S)-3-amino-1-((pent-4-en-1-yloxy)carbonyl)pyrrolidine-3-ca rboxylic acid, useful for stapling/stapled with another amino acid residue comprising an olefin group to form a staple through the olefin group
  SITE 11: note = (S)-2-amino-3-(thiophen-3-yl)propanoic acid
  SITE 12: note = (S)-2-amino-3-(benzo[b]thiophen-3-yl)propanoic acid
  SITE 13: note = L-glutamic acid, useful for stapling/stapled with another amino acid residue comprising a side chain amino group to form a staple through the 4-carboxyl group
  SITE 14: note = C-term amino
DXXDXXAFKXXXEA

SEQ ID NO: 1124 - protein, 14 aa, synthetic construct
  SITE 1: note = N-term (R)-2-methyl-2-(2-oxopyrrolidin-1-yl)pent-4-enoic acid, useful for stapling/stapled with another amino acid residue comprising an olefin group to form a staple through the olefin group
  SITE 2: note = (S)-2-amino-4,4-dimethylpentanoic acid
  VARIANT 3: note = 2-amino-2-(hex-5-en-1-yl)oct-7-enoic acid, useful for stapling/stapled with another amino acid residue comprising an olefin group to form a staple through one of the two olefin groups and/or with another amino acid residue comprising an olefin group to form a staple through the other of the two olefin groups
  SITE 5: note = (S)-3-(2-amino-2-carboxyethyl)benzoic acid
  SITE 6: note = 2-amino-2-methylpropanoic acid
  SITE 9: note = L-lysine, useful for stapling/stapled with another amino acid residue comprising a side chain acid group to form a staple through the 6-amino group
  SITE 10: note (S)-3-amino-1-((but-3-en-1-yloxy)carbonyl)pyrrolidine-3-car boxylic acid, useful for stapling/stapled with another amino acid residue comprising an olefin group to form a staple through the olefin group
  SITE 11: note = (S)-2-amino-3-(thiophen-3-yl)propanoic acid
  SITE 12: note = (S)-2-amino-3-(benzo[b]thiophen-3-yl)propanoic acid
  SITE 13: note = L-glutamic acid, useful for stapling/stapled with another amino acid residue comprising a side chain amino group to form a staple through the 4-carboxyl group
  SITE 14: note = C-term amino
DXXDXXAFKXXXEA

SEQ ID NO: 1125 - protein, 14 aa, synthetic construct
  SITE 1: note = N-term (R)-2-methyl-2-(2-oxopyrrolidin-1-yl)pent-4-enoic acid, useful for stapling/stapled with another amino acid residue comprising an olefin group to form a staple through the olefin group
  VARIANT 3: note = 2-amino-2-(but-3-en-1-yl)hex-5-enoic acid, useful for stapling/stapled with another amino acid residue comprising an olefin group to form a staple through one of the two olefin groups and/or with another amino acid residue comprising an olefin group to form a staple through the other of the two olefin groups
  SITE 5: note = (S)-3-(2-amino-2-carboxyethyl)benzoic acid
  SITE 6: note = 2-amino-2-methylpropanoic acid
  SITE 9: note = L-lysine, useful for stapling/stapled with another amino acid residue comprising a side chain acid group to form a staple through the 6-amino group
  SITE 10: note (S)-3-amino-1-((hex-5-en-1-yloxy)carbonyl)pyrrolidine-3-car boxylic acid, useful for stapling/stapled with another amino acid residue comprising an olefin group to form a staple through the olefin group
  SITE 11: note = (S)-2-amino-3-(thiophen-3-yl)propanoic acid
  SITE 12: note = (S)-2-amino-3-(benzo[b]thiophen-3-yl)propanoic acid
  SITE 13: note = L-glutamic acid, useful for stapling/stapled with another amino acid residue comprising a side chain amino group to form a staple through the 4-carboxyl group
  SITE 14: note = C-term amino
DAXDXXAFKXXXEA

SEQ ID NO: 1126 - protein, 14 aa, synthetic construct
  SITE 1: note = N-term (R)-2-methyl-2-(2-oxopyrrolidin-1-yl)pent-4-enoic acid, useful for stapling/stapled with another amino acid residue comprising an olefin group to form a staple through the olefin group
  VARIANT 3: note = 2-amino-2-(pent-4-en-1-yl)hept-6-enoic acid, useful for stapling/stapled with another amino acid residue comprising an olefin group to form a staple through one of the two olefin groups and/or with another amino acid residue comprising an olefin group to form a staple through the other of the two olefin groups
  SITE 5: note = (S)-3-(2-amino-2-carboxyethyl)benzoic acid
  SITE 6: note = 2-amino-2-methylpropanoic acid
  SITE 9: note = L-lysine, useful for stapling/stapled with another amino acid residue comprising a side chain acid group to form a staple through the 6-amino group
  SITE 10: note (S)-3-amino-1-((pent-4-en-1-yloxy)carbonyl)pyrrolidine-3-ca rboxylic acid, useful for stapling/stapled with another amino acid residue comprising an olefin group to form a staple through the olefin group
  SITE 11: note = (S)-2-amino-3-(thiophen-3-yl)propanoic acid
  SITE 12: note = (S)-2-amino-3-(benzo[b]thiophen-3-yl)propanoic acid
  SITE 13: note = L-glutamic acid, useful for stapling/stapled with another amino acid residue comprising a side chain amino group to form a staple through the 4-carboxyl group
  SITE 14: note = C-term amino
DAXDXXAFKXXXEA

SEQ ID NO: 1127 - protein, 14 aa, synthetic construct
  SITE 1: note = N-term (R)-2-methyl-2-(2-oxopyrrolidin-1-yl)pent-4-enoic acid, useful for stapling/stapled with another amino acid residue comprising an olefin group to form a staple through the olefin group
  VARIANT 3: note = 2-amino-2-(hex-5-en-1-yl)oct-7-enoic acid, useful for stapling/stapled with another amino acid residue comprising an olefin group to form a staple through one of the two olefin groups and/or with another amino acid residue comprising an olefin group to form a staple through the other of the two olefin groups
  SITE 5: note = (S)-3-(2-amino-2-carboxyethyl)benzoic acid
  SITE 6: note = 2-amino-2-methylpropanoic acid
  SITE 9: note = L-lysine, useful for stapling/stapled with another amino acid residue comprising a side chain acid group to form a staple through the 6-amino group
  SITE 10: note (S)-3-amino-1-((but-3-en-1-yloxy)carbonyl)pyrrolidine-3-car boxylic acid, useful for stapling/stapled with another amino acid residue comprising an olefin group to form a staple through the olefin group
  SITE 11: note = (S)-2-amino-3-(thiophen-3-yl)propanoic acid
  SITE 12: note = (S)-2-amino-3-(benzo[b]thiophen-3-yl)propanoic acid
  SITE 13: note = L-glutamic acid, useful for stapling/stapled with another amino acid residue comprising a side chain amino group to form a staple through the 4-carboxyl group
  SITE 14: note = C-term amino
DAXDXXAFKXXXEA

SEQ ID NO: 1128 - protein, 14 aa, synthetic construct
  SITE 1: note = (R)-2-allylpyrrolidine-2-carboxylic acid, useful for stapling/stapled with another amino acid residue comprising an olefin group to form a staple through the olefin group
  SITE 3: note = (S)-2-amino-3-cyclohexylpropanoic acid
  VARIANT 4: note = 2-amino-2-(pent-4-en-1-yl)hept-6-enoic acid, useful for stapling/stapled with another amino acid residue comprising an olefin group to form a staple through one of the two olefin groups and/or with another amino acid residue comprising an olefin group to form a staple through the other of the two olefin groups
  SITE 6: note = (S)-3-(2-amino-2-carboxyethyl)benzoic acid
  SITE 7: note = 2-amino-2-methylpropanoic acid
  SITE 10: note = L-lysine, useful for stapling/stapled with another amino acid residue comprising a side chain acid group to form a staple through the 6-amino group
  SITE 11: note (S)-3-amino-1-((pent-4-en-1-yloxy)carbonyl)pyrrolidine-3-ca rboxylic acid, useful for stapling/stapled with another amino acid residue comprising an olefin group to form a staple through the olefin group
  SITE 12: note = (S)-2-amino-3-(2-chlorophenyl)propanoic acid
  SITE 13: note = (S)-2-amino-3-(3,4-dichlorophenyl)propanoic acid
  SITE 14: note = L-glutamic acid, useful for stapling/stapled with another amino acid residue comprising a side chain amino group to form a staple through the 4-carboxyl group
  SITE 14: note = C-term amino
XDXXDXXAFKXXXE

SEQ ID NO: 1129 - protein, 14 aa, synthetic construct
  SITE 1: note = (R)-2-allylpyrrolidine-2-carboxylic acid, useful for stapling/stapled with another amino acid residue comprising an olefin group to form a staple through the olefin group
  SITE 3: note = (S)-2-amino-3-cyclohexylpropanoic acid
  VARIANT 4: note = 2-amino-2-(pent-4-en-1-yl)hept-6-enoic acid, useful for stapling/stapled with another amino acid residue comprising an olefin group to form a staple through one of the two olefin groups and/or with another amino acid residue comprising an olefin group to form a staple through the other of the two olefin groups
  SITE 6: note = (S)-3-(2-amino-2-carboxyethyl)benzoic acid
  SITE 10: note = L-lysine, useful for stapling/stapled with another amino acid residue comprising a side chain acid group to form a staple through the 6-amino group
  SITE 11: note (S)-3-amino-1-((pent-4-en-1-yloxy)carbonyl)pyrrolidine-3-ca rboxylic acid, useful for stapling/stapled with another amino acid residue comprising an olefin group to form a staple through the olefin group
  SITE 12: note = (S)-2-amino-3-(2-chlorophenyl)propanoic acid
  SITE 13: note = (S)-2-amino-3-(3,4-dichlorophenyl)propanoic acid
  SITE 14: note = L-glutamic acid, useful for stapling/stapled with another amino acid residue comprising a side chain amino group to form a staple through the 4-carboxyl group
  SITE 14: note = C-term amino
XDXXDXAAFKXXXE

SEQ ID NO: 1130 - protein, 14 aa, synthetic construct
  SITE 1: note = (R)-2-allylpyrrolidine-2-carboxylic acid, useful for stapling/stapled with another amino acid residue comprising an olefin group to form a staple through the olefin group
  SITE 3: note = (S)-2-amino-3-cyclohexylpropanoic acid
  VARIANT 4: note = 2-amino-2-(pent-4-en-1-yl)hept-6-enoic acid, useful for stapling/stapled with another amino acid residue comprising an olefin group to form a staple through one of the two olefin groups and/or with another amino acid residue comprising an olefin group to form a staple through the other of the two olefin groups
  SITE 6: note = (S)-3-(2-amino-2-carboxyethyl)benzoic acid
  SITE 7: note = 1-aminocyclopentane-1-carboxylic acid
  SITE 10: note = L-lysine, useful for stapling/stapled with another amino acid residue comprising a side chain acid group to form a staple through the 6-amino group
  SITE 11: note (S)-3-amino-1-((pent-4-en-1-yloxy)carbonyl)pyrrolidine-3-ca rboxylic acid, useful for stapling/stapled with another amino acid residue comprising an olefin group to form a staple through the olefin group
  SITE 12: note = (S)-2-amino-3-(2-chlorophenyl)propanoic acid
  SITE 13: note = (S)-2-amino-3-(3,4-dichlorophenyl)propanoic acid
  SITE 14: note = L-glutamic acid, useful for stapling/stapled with another amino acid residue comprising a side chain amino group to form a staple through the 4-carboxyl group
  SITE 14: note = C-term amino
XDXXDXXAFKXXXE

SEQ ID NO: 1131 - protein, 14 aa, synthetic construct
  SITE 1: note = N-term Acetic Acid
  SITE 1: note = (R)-2-allylpyrrolidine-2-carboxylic acid, useful for stapling/stapled with another amino acid residue comprising an olefin group to form a staple through the olefin group
  SITE 3: note = (S)-2-amino-2-cyclohexylacetic acid
  VARIANT 4: note = 2-amino-2-(pent-4-en-1-yl)hept-6-enoic acid, useful for stapling/stapled with another amino acid residue comprising an olefin group to form a staple through one of the two olefin groups and/or with another amino acid residue comprising an olefin group to form a staple through the other of the two olefin groups
  SITE 6: note = (S)-3-(2-amino-2-carboxyethyl)benzoic acid
  SITE 7: note = 2-amino-2-methylpropanoic acid
  SITE 10: note = L-lysine, useful for stapling/stapled with another amino acid residue comprising a side chain acid group to form a staple through the 6-amino group
  SITE 11: note (S)-3-amino-1-((pent-4-en-1-yloxy)carbonyl)pyrrolidine-3-ca rboxylic acid, useful for stapling/stapled with another amino acid residue comprising an olefin group to form a staple through the olefin group
  SITE 12: note = (S)-2-amino-3-(2-chlorophenyl)propanoic acid
  SITE 13: note = (S)-2-amino-3-(3,4-dichlorophenyl)propanoic acid
  SITE 14: note = L-glutamic acid, useful for stapling/stapled with another amino acid residue comprising a side chain amino group to form a staple through the 4-carboxyl group
  SITE 14: note = C-term amino
XDXXDXXAFKXXXE

SEQ ID NO: 1132 - protein, 14 aa, synthetic construct
  SITE 1: note = N-term Acetic Acid
  SITE 1: note = (R)-2-allylpyrrolidine-2-carboxylic acid, useful for stapling/stapled with another amino acid residue comprising an olefin group to form a staple through the olefin group
  SITE 3: note = (S)-2-amino-2-cyclohexylacetic acid
  VARIANT 4: note = 2-amino-2-(pent-4-en-1-yl)hept-6-enoic acid, useful for stapling/stapled with another amino acid residue comprising an olefin group to form a staple through one of the two olefin groups and/or with another amino acid residue comprising an olefin group to form a staple through the other of the two olefin groups
  SITE 6: note = (S)-3-(2-amino-2-carboxyethyl)benzoic acid
  SITE 10: note = L-lysine, useful for stapling/stapled with another amino acid residue comprising a side chain acid group to form a staple through the 6-amino group
  SITE 11: note (S)-3-amino-1-((pent-4-en-1-yloxy)carbonyl)pyrrolidine-3-ca rboxylic acid, useful for stapling/stapled with another amino acid residue comprising an olefin group to form a staple through the olefin group
  SITE 12: note = (S)-2-amino-3-(2-chlorophenyl)propanoic acid
  SITE 13: note = (S)-2-amino-3-(3,4-dichlorophenyl)propanoic acid
  SITE 14: note = L-glutamic acid, useful for stapling/stapled with another amino acid residue comprising a side chain amino group to form a staple through the 4-carboxyl group
  SITE 14: note = C-term amino
XDXXDXAAFKXXXE

SEQ ID NO: 1133 - protein, 14 aa, synthetic construct
  SITE 1: note = N-term Acetic Acid
  SITE 1: note = (R)-2-allylpyrrolidine-2-carboxylic acid, useful for stapling/stapled with another amino acid residue comprising an olefin group to form a staple through the olefin group
  SITE 3: note = (S)-2-amino-2-cyclohexylacetic acid
  VARIANT 4: note = 2-amino-2-(pent-4-en-1-yl)hept-6-enoic acid, useful for stapling/stapled with another amino acid residue comprising an olefin group to form a staple through one of the two olefin groups and/or with another amino acid residue comprising an olefin group to form a staple through the other of the two olefin groups
  SITE 6: note = (S)-3-(2-amino-2-carboxyethyl)benzoic acid
  SITE 7: note = 1-aminocyclopentane-1-carboxylic acid
  SITE 10: note = L-lysine, useful for stapling/stapled with another amino acid residue comprising a side chain acid group to form a staple through the 6-amino group
  SITE 11: note (S)-3-amino-1-((pent-4-en-1-yloxy)carbonyl)pyrrolidine-3-ca rboxylic acid, useful for stapling/stapled with another amino acid residue comprising an olefin group to form a staple through the olefin group
  SITE 12: note = (S)-2-amino-3-(2-chlorophenyl)propanoic acid
  SITE 13: note = (S)-2-amino-3-(3,4-dichlorophenyl)propanoic acid
  SITE 14: note = L-glutamic acid, useful for stapling/stapled with another amino acid residue comprising a side chain amino group to form a staple through the 4-carboxyl group
  SITE 14: note = C-term amino
XDXXDXXAFKXXXE

SEQ ID NO: 1134 - protein, 14 aa, synthetic construct
  SITE 1: note = N-term Acetic Acid
  SITE 1: note = (R)-2-allylpyrrolidine-2-carboxylic acid, useful for stapling/stapled with another amino acid residue comprising an olefin group to form a staple through the olefin group
  VARIANT 4: note = 2-amino-2-(pent-4-en-1-yl)hept-6-enoic acid, useful for stapling/stapled with another amino acid residue comprising an olefin group to form a staple through one of the two olefin groups and/or with another amino acid residue comprising an olefin group to form a staple through the other of the two olefin groups
  SITE 6: note = (S)-3-(2-amino-2-carboxyethyl)benzoic acid
  SITE 7: note = 2-amino-2-methylpropanoic acid
  SITE 10: note = L-lysine, useful for stapling/stapled with another amino acid residue comprising a side chain acid group to form a staple through the 6-amino group
  SITE 11: note (S)-3-amino-1-((pent-4-en-1-yloxy)carbonyl)pyrrolidine-3-ca rboxylic acid, useful for stapling/stapled with another amino acid residue comprising an olefin group to form a staple through the olefin group
  SITE 12: note = (S)-2-amino-3-(o-tolyl)propanoic acid
  SITE 13: note = (S)-2-amino-3-(3,4-dichlorophenyl)propanoic acid
  SITE 14: note = L-glutamic acid, useful for stapling/stapled with another amino acid residue comprising a side chain amino group to form a staple through the 4-carboxyl group
  SITE 14: note = C-term amino
XDIXDXXAFKXXXE

SEQ ID NO: 1135 - protein, 14 aa, synthetic construct
  SITE 1: note = N-term Acetic Acid
  SITE 1: note = (R)-2-allylpyrrolidine-2-carboxylic acid, useful for stapling/stapled with another amino acid residue comprising an olefin group to form a staple through the olefin group
  VARIANT 4: note = 2-amino-2-(pent-4-en-1-yl)hept-6-enoic acid, useful for stapling/stapled with another amino acid residue comprising an olefin group to form a staple through one of the two olefin groups and/or with another amino acid residue comprising an olefin group to form a staple through the other of the two olefin groups
  SITE 6: note = (S)-3-(2-amino-2-carboxyethyl)benzoic acid
  SITE 10: note = L-lysine, useful for stapling/stapled with another amino acid residue comprising a side chain acid group to form a staple through the 6-amino group
  SITE 11: note (S)-3-amino-1-((pent-4-en-1-yloxy)carbonyl)pyrrolidine-3-ca rboxylic acid, useful for stapling/stapled with another amino acid residue comprising an olefin group to form a staple through the olefin group
  SITE 12: note = (S)-2-amino-3-(o-tolyl)propanoic acid
  SITE 13: note = (S)-2-amino-3-(3,4-dichlorophenyl)propanoic acid
  SITE 14: note = L-glutamic acid, useful for stapling/stapled with another amino acid residue comprising a side chain amino group to form a staple through the 4-carboxyl group
  SITE 14: note = C-term amino
XDIXDXAAFKXXXE

SEQ ID NO: 1136 - protein, 14 aa, synthetic construct
  SITE 1: note = N-term Acetic Acid
  SITE 1: note = (R)-2-allylpyrrolidine-2-carboxylic acid, useful for stapling/stapled with another amino acid residue comprising an olefin group to form a staple through the olefin group
  VARIANT 4: note = 2-amino-2-(pent-4-en-1-yl)hept-6-enoic acid, useful for stapling/stapled with another amino acid residue comprising an olefin group to form a staple through one of the two olefin groups and/or with another amino acid residue comprising an olefin group to form a staple through the other of the two olefin groups
  SITE 6: note = (S)-3-(2-amino-2-carboxyethyl)benzoic acid
  SITE 7: note = 1-aminocyclopentane-1-carboxylic acid
  SITE 10: note = L-lysine, useful for stapling/stapled with another amino acid residue comprising a side chain acid group to form a staple through the 6-amino group
  SITE 11: note (S)-3-amino-1-((pent-4-en-1-yloxy)carbonyl)pyrrolidine-3-ca rboxylic acid, useful for stapling/stapled with another amino acid residue comprising an olefin group to form a staple through the olefin group
  SITE 12: note = (S)-2-amino-3-(o-tolyl)propanoic acid
  SITE 13: note = (S)-2-amino-3-(3,4-dichlorophenyl)propanoic acid
  SITE 14: note = L-glutamic acid, useful for stapling/stapled with another amino acid residue comprising a side chain amino group to form a staple through the 4-carboxyl group
  SITE 14: note = C-term amino
XDIXDXXAFKXXXE

SEQ ID NO: 1137 - protein, 14 aa, synthetic construct
  SITE 1: note = N-term Acetic Acid
  SITE 1: note = (R)-2-allylpyrrolidine-2-carboxylic acid, useful for stapling/stapled with another amino acid residue comprising an olefin group to form a staple through the olefin group
  VARIANT 4: note = 2-amino-2-(pent-4-en-1-yl)hept-6-enoic acid, useful for stapling/stapled with another amino acid residue comprising an olefin group to form a staple through one of the two olefin groups and/or with another amino acid residue comprising an olefin group to form a staple through the other of the two olefin groups
  SITE 6: note = (S)-3-(2-amino-2-carboxyethyl)benzoic acid
  SITE 7: note = 2-amino-2-methylpropanoic acid
  SITE 10: note = L-lysine, useful for stapling/stapled with another amino acid residue comprising a side chain acid group to form a staple through the 6-amino group
  SITE 11: note (S)-3-amino-1-((pent-4-en-1-yloxy)carbonyl)pyrrolidine-3-ca rboxylic acid, useful for stapling/stapled with another amino acid residue comprising an olefin group to form a staple through the olefin group
  SITE 12: note = (S)-2-amino-3-(o-tolyl)propanoic acid
  SITE 13: note = (S)-2-amino-3-(3,4-dichlorophenyl)propanoic acid
  SITE 14: note = L-glutamic acid, useful for stapling/stapled with another amino acid residue comprising a side chain amino group to form a staple through the 4-carboxyl group
  SITE 14: note = C-term amino
XDLXDXXAFKXXXE

SEQ ID NO: 1138 - protein, 14 aa, synthetic construct
  SITE 1: note = N-term Acetic Acid
  SITE 1: note = (R)-2-allylpyrrolidine-2-carboxylic acid, useful for stapling/stapled with another amino acid residue comprising an olefin group to form a staple through the olefin group
  VARIANT 4: note = 2-amino-2-(pent-4-en-1-yl)hept-6-enoic acid, useful for stapling/stapled with another amino acid residue comprising an olefin group to form a staple through one of the two olefin groups and/or with another amino acid residue comprising an olefin group to form a staple through the other of the two olefin groups
  SITE 6: note = (S)-3-(2-amino-2-carboxyethyl)benzoic acid
  SITE 10: note = L-lysine, useful for stapling/stapled with another amino acid residue comprising a side chain acid group to form a staple through the 6-amino group
  SITE 11: note (S)-3-amino-1-((pent-4-en-1-yloxy)carbonyl)pyrrolidine-3-ca rboxylic acid, useful for stapling/stapled with another amino acid residue comprising an olefin group to form a staple through the olefin group
  SITE 12: note = (S)-2-amino-3-(o-tolyl)propanoic acid
  SITE 13: note = (S)-2-amino-3-(3,4-dichlorophenyl)propanoic acid
  SITE 14: note = L-glutamic acid, useful for stapling/stapled with another amino acid residue comprising a side chain amino group to form a staple through the 4-carboxyl group
  SITE 14: note = C-term amino
XDLXDXAAFKXXXE

SEQ ID NO: 1139 - protein, 14 aa, synthetic construct
  SITE 1: note = N-term Acetic Acid
  SITE 1: note = (R)-2-allylpyrrolidine-2-carboxylic acid, useful for stapling/stapled with another amino acid residue comprising an olefin group to form a staple through the olefin group
  VARIANT 4: note = 2-amino-2-(pent-4-en-1-yl)hept-6-enoic acid, useful for stapling/stapled with another amino acid residue comprising an olefin group to form a staple through one of the two olefin groups and/or with another amino acid residue comprising an olefin group to form a staple through the other of the two olefin groups
  SITE 6: note = (S)-3-(2-amino-2-carboxyethyl)benzoic acid
  SITE 7: note = 1-aminocyclopentane-1-carboxylic acid
  SITE 10: note = L-lysine, useful for stapling/stapled with another amino acid residue comprising a side chain acid group to form a staple through the 6-amino group
  SITE 11: note (S)-3-amino-1-((pent-4-en-1-yloxy)carbonyl)pyrrolidine-3-ca rboxylic acid, useful for stapling/stapled with another amino acid residue comprising an olefin group to form a staple through the olefin group
  SITE 12: note = (S)-2-amino-3-(o-tolyl)propanoic acid
  SITE 13: note = (S)-2-amino-3-(3,4-dichlorophenyl)propanoic acid
  SITE 14: note = L-glutamic acid, useful for stapling/stapled with another amino acid residue comprising a side chain amino group to form a staple through the 4-carboxyl group
  SITE 14: note = C-term amino
XDLXDXXAFKXXXE

SEQ ID NO: 1140 - protein, 14 aa, synthetic construct
  SITE 1: note = N-term Acetic Acid
  SITE 1: note = (R)-2-allylpyrrolidine-2-carboxylic acid, useful for stapling/stapled with another amino acid residue comprising an olefin group to form a staple through the olefin group
  SITE 3: note = (S)-2-amino-3-cyclohexylpropanoic acid
  VARIANT 4: note = 2-amino-2-(pent-4-en-1-yl)hept-6-enoic acid, useful for stapling/stapled with another amino acid residue comprising an olefin group to form a staple through one of the two olefin groups and/or with another amino acid residue comprising an olefin group to form a staple through the other of the two olefin groups
  SITE 6: note = (S)-3-(2-amino-2-carboxyethyl)benzoic acid
  SITE 7: note = 2-amino-2-methylpropanoic acid
  SITE 10: note = L-lysine, useful for stapling/stapled with another amino acid residue comprising a side chain acid group to form a staple through the 6-amino group
  SITE 11: note (S)-3-amino-1-((pent-4-en-1-yloxy)carbonyl)pyrrolidine-3-ca rboxylic acid, useful for stapling/stapled with another amino acid residue comprising an olefin group to form a staple through the olefin group
  SITE 12: note = (S)-2-amino-3-(o-tolyl)propanoic acid
  SITE 13: note = (S)-2-amino-3-(3,4-dichlorophenyl)propanoic acid
  SITE 14: note = L-glutamic acid, useful for stapling/stapled with another amino acid residue comprising a side chain amino group to form a staple through the 4-carboxyl group
  SITE 14: note = C-term amino
XDXXDXXAFKXXXE

SEQ ID NO: 1141 - protein, 14 aa, synthetic construct
  SITE 1: note = N-term Acetic Acid
  SITE 1: note = (R)-2-allylpyrrolidine-2-carboxylic acid, useful for stapling/stapled with another amino acid residue comprising an olefin group to form a staple through the olefin group
  SITE 3: note = (S)-2-amino-3-cyclohexylpropanoic acid
  VARIANT 4: note = 2-amino-2-(pent-4-en-1-yl)hept-6-enoic acid, useful for stapling/stapled with another amino acid residue comprising an olefin group to form a staple through one of the two olefin groups and/or with another amino acid residue comprising an olefin group to form a staple through the other of the two olefin groups
  SITE 6: note = (S)-3-(2-amino-2-carboxyethyl)benzoic acid
  SITE 10: note = L-lysine, useful for stapling/stapled with another amino acid residue comprising a side chain acid group to form a staple through the 6-amino group
  SITE 11: note (S)-3-amino-1-((pent-4-en-1-yloxy)carbonyl)pyrrolidine-3-ca rboxylic acid, useful for stapling/stapled with another amino acid residue comprising an olefin group to form a staple through the olefin group
  SITE 12: note = (S)-2-amino-3-(o-tolyl)propanoic acid
  SITE 13: note = (S)-2-amino-3-(3,4-dichlorophenyl)propanoic acid
  SITE 14: note = L-glutamic acid, useful for stapling/stapled with another amino acid residue comprising a side chain amino group to form a staple through the 4-carboxyl group
  SITE 14: note = C-term amino
XDXXDXAAFKXXXE

SEQ ID NO: 1142 - protein, 14 aa, synthetic construct
  SITE 1: note = N-term Acetic Acid
  SITE 1: note = (R)-2-allylpyrrolidine-2-carboxylic acid, useful for stapling/stapled with another amino acid residue comprising an olefin group to form a staple through the olefin group
  SITE 3: note = (S)-2-amino-2-cyclohexylacetic acid
  VARIANT 4: note = 2-amino-2-(pent-4-en-1-yl)hept-6-enoic acid, useful for stapling/stapled with another amino acid residue comprising an olefin group to form a staple through one of the two olefin groups and/or with another amino acid residue comprising an olefin group to form a staple through the other of the two olefin groups
  SITE 6: note = (S)-3-(2-amino-2-carboxyethyl)benzoic acid
  SITE 7: note = 2-amino-2-methylpropanoic acid
  SITE 10: note = L-lysine, useful for stapling/stapled with another amino acid residue comprising a side chain acid group to form a staple through the 6-amino group
  SITE 11: note (S)-3-amino-1-((pent-4-en-1-yloxy)carbonyl)pyrrolidine-3-ca rboxylic acid, useful for stapling/stapled with another amino acid residue comprising an olefin group to form a staple through the olefin group
  SITE 12: note = (S)-2-amino-3-(o-tolyl)propanoic acid
  SITE 13: note = (S)-2-amino-3-(3,4-dichlorophenyl)propanoic acid
  SITE 14: note = L-glutamic acid, useful for stapling/stapled with another amino acid residue comprising a side chain amino group to form a staple through the 4-carboxyl group
  SITE 14: note = C-term amino
XDXXDXXAFKXXXE

SEQ ID NO: 1143 - protein, 14 aa, synthetic construct
  SITE 1: note = N-term Acetic Acid
  SITE 1: note = (R)-2-allylpyrrolidine-2-carboxylic acid, useful for stapling/stapled with another amino acid residue comprising an olefin group to form a staple through the olefin group
  SITE 3: note = (S)-2-amino-2-cyclohexylacetic acid
  VARIANT 4: note = 2-amino-2-(pent-4-en-1-yl)hept-6-enoic acid, useful for stapling/stapled with another amino acid residue comprising an olefin group to form a staple through one of the two olefin groups and/or with another amino acid residue comprising an olefin group to form a staple through the other of the two olefin groups
  SITE 6: note = (S)-3-(2-amino-2-carboxyethyl)benzoic acid
  SITE 10: note = L-lysine, useful for stapling/stapled with another amino acid residue comprising a side chain acid group to form a staple through the 6-amino group
  SITE 11: note (S)-3-amino-1-((pent-4-en-1-yloxy)carbonyl)pyrrolidine-3-ca rboxylic acid, useful for stapling/stapled with another amino acid residue comprising an olefin group to form a staple through the olefin group
  SITE 12: note = (S)-2-amino-3-(o-tolyl)propanoic acid
  SITE 13: note = (S)-2-amino-3-(3,4-dichlorophenyl)propanoic acid
  SITE 14: note = L-glutamic acid, useful for stapling/stapled with another amino acid residue comprising a side chain amino group to form a staple through the 4-carboxyl group
  SITE 14: note = C-term amino
XDXXDXAAFKXXXE

SEQ ID NO: 1144 - protein, 15 aa, synthetic construct
  SITE 1: note = N-term Acetic Acid
  SITE 1: note = (R)-2-allylpyrrolidine-2-carboxylic acid, useful for stapling/stapled with another amino acid residue comprising an olefin group to form a staple through the olefin group
  SITE 3: note = (S)-2-amino-4,4-dimethylpentanoic acid
  VARIANT 4: note = 2-amino-2-(pent-4-en-1-yl)hept-6-enoic acid, useful for stapling/stapled with another amino acid residue comprising an olefin group to form a staple through one of the two olefin groups and/or with another amino acid residue comprising an olefin group to form a staple through the other of the two olefin groups
  SITE 6: note = (S)-3-(2-amino-2-carboxyethyl)benzoic acid
  SITE 7: note = 2-amino-2-methylpropanoic acid
  SITE 10: note = Cysteine, sulfur bonded to the methyl at position 1 of 1,3-dimethylbenzene, useful for stapling/stapled with another thiol through the methyl at position 3 of 1,3-dimethylbenzene
  SITE 11: note (S)-3-amino-1-((pent-4-en-1-yloxy)carbonyl)pyrrolidine-3-ca rboxylic acid, useful for stapling/stapled with another amino acid residue comprising an olefin group to form a staple through the olefin group
  SITE 12: note = (S)-2-amino-3-(thiophen-3-yl)propanoic acid
  SITE 13: note = (S)-2-amino-3-(benzo[b]thiophen-3-yl)propanoic acid
  SITE 15: note = C-term amino
XDXXDXXAFCXXXCS

SEQ ID NO: 1145 - protein, 15 aa, synthetic construct
  SITE 1: note = N-term Acetic Acid
  SITE 1: note = (R)-2-allylpyrrolidine-2-carboxylic acid, useful for stapling/stapled with another amino acid residue comprising an olefin group to form a staple through the olefin group
  SITE 3: note = (S)-2-amino-4,4-dimethylpentanoic acid
  VARIANT 4: note = 2-amino-2-(pent-4-en-1-yl)hept-6-enoic acid, useful for stapling/stapled with another amino acid residue comprising an olefin group to form a staple through one of the two olefin groups and/or with another amino acid residue comprising an olefin group to form a staple through the other of the two olefin groups
  SITE 6: note = (S)-3-(2-amino-2-carboxyethyl)benzoic acid
  SITE 7: note = 2-amino-2-methylpropanoic acid
  SITE 10: note = Cysteine, sulfur bonded to the methyl at position 2 of 2,6-dimethylpyridine, useful for stapling/stapled with another thiol through the methyl position 6 of 2,6-dimethylpyridine
  SITE 11: note (S)-3-amino-1-((pent-4-en-1-yloxy)carbonyl)pyrrolidine-3-ca rboxylic acid, useful for stapling/stapled with another amino acid residue comprising an olefin group to form a staple through the olefin group
  SITE 12: note = (S)-2-amino-3-(thiophen-3-yl)propanoic acid
  SITE 13: note = (S)-2-amino-3-(benzo[b]thiophen-3-yl)propanoic acid
  SITE 15: note = C-term amino
XDXXDXXAFCXXXCS

SEQ ID NO: 1146 - protein, 15 aa, synthetic construct
  SITE 1: note = N-term Acetic Acid
  SITE 1: note = (R)-2-allylpyrrolidine-2-carboxylic acid, useful for stapling/stapled with another amino acid residue comprising an olefin group to form a staple through the olefin group
  SITE 3: note = (S)-2-amino-4,4-dimethylpentanoic acid
  VARIANT 4: note = 2-amino-2-(pent-4-en-1-yl)hept-6-enoic acid, useful for stapling/stapled with another amino acid residue comprising an olefin group to form a staple through one of the two olefin groups and/or with another amino acid residue comprising an olefin group to form a staple through the other of the two olefin groups
  SITE 6: note = (S)-3-(2-amino-2-carboxyethyl)benzoic acid
  SITE 7: note = 2-amino-2-methylpropanoic acid
  SITE 10: note = Cysteine, sulfur bonded to position 1 of butane, useful for stapling/stapled with another thiol through position 4 of butane
  SITE 11: note (S)-3-amino-1-((pent-4-en-1-yloxy)carbonyl)pyrrolidine-3-ca rboxylic acid, useful for stapling/stapled with another amino acid residue comprising an olefin group to form a staple through the olefin group
  SITE 12: note = (S)-2-amino-3-(thiophen-3-yl)propanoic acid
  SITE 13: note = (S)-2-amino-3-(benzo[b]thiophen-3-yl)propanoic acid
  SITE 15: note = C-term amino
XDXXDXXAFCXXXCS

SEQ ID NO: 1147 - protein, 15 aa, synthetic construct
  SITE 1: note = N-term Acetic Acid
  SITE 1: note = (R)-2-allylpyrrolidine-2-carboxylic acid, useful for stapling/stapled with another amino acid residue comprising an olefin group to form a staple through the olefin group
  SITE 3: note = (S)-2-amino-4,4-dimethylpentanoic acid
  VARIANT 4: note = 2-amino-2-(pent-4-en-1-yl)hept-6-enoic acid, useful for stapling/stapled with another amino acid residue comprising an olefin group to form a staple through one of the two olefin groups and/or with another amino acid residue comprising an olefin group to form a staple through the other of the two olefin groups
  SITE 6: note = (S)-3-(2-amino-2-carboxyethyl)benzoic acid
  SITE 7: note = 2-amino-2-methylpropanoic acid
  SITE 10: note = Cysteine, sulfur bonded to position 1 of propane, useful for stapling/stapled with another thiol through position 3 of propane
  SITE 11: note (S)-3-amino-1-((pent-4-en-1-yloxy)carbonyl)pyrrolidine-3-ca rboxylic acid, useful for stapling/stapled with another amino acid residue comprising an olefin group to form a staple through the olefin group
  SITE 12: note = (S)-2-amino-3-(thiophen-3-yl)propanoic acid
  SITE 13: note = (S)-2-amino-3-(benzo[b]thiophen-3-yl)propanoic acid
  SITE 15: note = C-term amino
XDXXDXXAFCXXXCS

SEQ ID NO: 1148 - protein, 15 aa, synthetic construct
  SITE 1: note = N-term Acetic Acid
  SITE 1: note = (S)-2-amino-2-methyloct-7-enoic acid, useful for stapling/stapled with another amino acid residue comprising an olefin group to form a staple through the olefin group
  SITE 2: note = 2-amino-2-methylpropanoic acid
  SITE 4: note = (S)-2-amino-4,4-dimethylpentanoic acid
  VARIANT 5: note = 2-amino-2-(pent-4-en-1-yl)hept-6-enoic acid, useful for stapling/stapled with another amino acid residue comprising an olefin group to form a staple through one of the two olefin groups and/or with another amino acid residue comprising an olefin group to form a staple through the other of the two olefin groups
  SITE 7: note = (S)-3-(2-amino-2-carboxyethyl)benzoic acid
  SITE 8: note = 2-amino-2-methylpropanoic acid
  SITE 11: note = L-lysine, useful for stapling/stapled with another amino acid residue comprising a side chain acid group to form a staple through the 6-amino group
  SITE 12: note (S)-3-amino-1-((pent-4-en-1-yloxy)carbonyl)pyrrolidine-3-ca rboxylic acid, useful for stapling/stapled with another amino acid residue comprising an olefin group to form a staple through the olefin group
  SITE 14: note = (S)-2-amino-3-(3,4-dichlorophenyl)propanoic acid
  SITE 15: note = L-glutamic acid, useful for stapling/stapled with another amino acid residue comprising a side chain amino group to form a staple through the 4-carboxyl group
  SITE 15: note = C-term amino
XXDXXDXXAFKXFXE

SEQ ID NO: 1149 - protein, 15 aa, synthetic construct
  SITE 1: note = N-term Acetic Acid
  SITE 1: note = (S)-2-amino-2-methyloct-7-enoic acid, useful for stapling/stapled with another amino acid residue comprising an olefin group to form a staple through the olefin group
  SITE 2: note = (S)-2-methylpyrrolidine-2-carboxylic acid
  SITE 4: note = (S)-2-amino-4,4-dimethylpentanoic acid
  VARIANT 5: note = 2-amino-2-(pent-4-en-1-yl)hept-6-enoic acid, useful for stapling/stapled with another amino acid residue comprising an olefin group to form a staple through one of the two olefin groups and/or with another amino acid residue comprising an olefin group to form a staple through the other of the two olefin groups
  SITE 7: note = (S)-3-(2-amino-2-carboxyethyl)benzoic acid
  SITE 8: note = 2-amino-2-methylpropanoic acid
  SITE 11: note = L-lysine, useful for stapling/stapled with another amino acid residue comprising a side chain acid group to form a staple through the 6-amino group
  SITE 12: note (S)-3-amino-1-((pent-4-en-1-yloxy)carbonyl)pyrrolidine-3-ca rboxylic acid, useful for stapling/stapled with another amino acid residue comprising an olefin group to form a staple through the olefin group
  SITE 14: note = (S)-2-amino-3-(3,4-dichlorophenyl)propanoic acid
  SITE 15: note = L-glutamic acid, useful for stapling/stapled with another amino acid residue comprising a side chain amino group to form a staple through the 4-carboxyl group
  SITE 15: note = C-term amino
XXDXXDXXAFKXFXE

SEQ ID NO: 1150 - protein, 18 aa, synthetic construct
  SITE 1: note = N-term Acetic Acid
  SITE 1: note = (R)-2-allylpyrrolidine-2-carboxylic acid, useful for stapling/stapled with another amino acid residue comprising an olefin group to form a staple through the olefin group
  SITE 3: note = (S)-2-amino-4,4-dimethylpentanoic acid
  VARIANT 4: note = 2-amino-2-(pent-4-en-1-yl)hept-6-enoic acid, useful for stapling/stapled with another amino acid residue comprising an olefin group to form a staple through one of the two olefin groups and/or with another amino acid residue comprising an olefin group to form a staple through the other of the two olefin groups
  SITE 6: note = (S)-3-(2-amino-2-carboxyethyl)benzoic acid
  SITE 7: note = 2-amino-2-methylpropanoic acid
  SITE 10: note = L-lysine, useful for stapling/stapled with another amino acid residue comprising a side chain acid group to form a staple through the 6-amino group
  SITE 11: note (S)-3-amino-1-((pent-4-en-1-yloxy)carbonyl)pyrrolidine-3-ca rboxylic acid, useful for stapling/stapled with another amino acid residue comprising an olefin group to form a staple through the olefin group
  SITE 12: note = (S)-2-amino-3-(thiophen-3-yl)propanoic acid
  SITE 13: note = (S)-2-amino-3-(benzo[b]thiophen-3-yl)propanoic acid
  SITE 14: note = L-glutamic acid, useful for stapling/stapled with another amino acid residue comprising a side chain amino group to form a staple through the 4-carboxyl group
  SITE 18: note (S)-1-(1-(2,5,8,11,14,17,20,23,26,29,32,35,38,41,44,47- hexadecaoxanonatetracontan-49-yl)-1H-1,2,3-triazol-4-yl)-4, 4-bis (((1-(2,5,8,11,14,17,20,23,26,29,32,35,38,41,44,47-hexadeca oxanonatetracontan-49-yl)-1H-1,2,3-triazol-4-yl)methoxy)met hyl)-27-amino-6,21-dioxo-2,9,12,15,18 -pentaoxa-5,22-diazaoctacosan-28-oic acid
  SITE 18: note = C-term amino
XDXXDXXAFKXXXEAAAX

SEQ ID NO: 1151 - protein, 18 aa, synthetic construct
  SITE 1: note = N-term Acetic Acid
  SITE 1: note = (R)-2-allylpyrrolidine-2-carboxylic acid, useful for stapling/stapled with another amino acid residue comprising an olefin group to form a staple through the olefin group
  SITE 3: note = (S)-2-amino-4,4-dimethylpentanoic acid
  VARIANT 4: note = 2-amino-2-(pent-4-en-1-yl)hept-6-enoic acid, useful for stapling/stapled with another amino acid residue comprising an olefin group to form a staple through one of the two olefin groups and/or with another amino acid residue comprising an olefin group to form a staple through the other of the two olefin groups
  SITE 6: note = (S)-3-(2-amino-2-carboxyethyl)benzoic acid
  SITE 7: note = 2-amino-2-methylpropanoic acid
  SITE 10: note = L-lysine, useful for stapling/stapled with another amino acid residue comprising a side chain acid group to form a staple through the 6-amino group
  SITE 11: note (S)-3-amino-1-((pent-4-en-1-yloxy)carbonyl)pyrrolidine-3-ca rboxylic acid, useful for stapling/stapled with another amino acid residue comprising an olefin group to form a staple through the olefin group
  SITE 12: note = (S)-2-amino-3-(thiophen-3-yl)propanoic acid
  SITE 13: note = (S)-2-amino-3-(benzo[b]thiophen-3-yl)propanoic acid
  SITE 14: note = L-glutamic acid, useful for stapling/stapled with another amino acid residue comprising a side chain amino group to form a staple through the 4-carboxyl group
  SITE 18: note (S)-1-(1-(2,5,8,11,14,17,20,23,26,29,32,35,38,41,44,47,50,5 3, 56,59,62,65,68,71,74,77,80,83,86,89,92,95,98,101,104,107- hexatriacontaoxanonahectan-109-yl)-1H-1,2,3-triazol-4-yl)-4 ,4-bis (((1-(2,5,8,11,14,17,20,23,26,29,32,35,38,41,44,47,50,53,56 ,59,62,65,68,71,74,77,80,83,86,89,92,95,98,101,104 ,107-hexatriacontaoxanonahectan-109-yl)-1H-1,2,3-triazol-4- yl) methoxy)methyl)-27-amino-6,21-dioxo-2,9,12,15,18-pentaoxa-5 ,22- diazaoctacosan-28-oic acid
  SITE 18: note = C-term amino
XDXXDXXAFKXXXEAAAX

SEQ ID NO: 1152 - protein, 14 aa, synthetic construct
  SITE 1: note = N-term Acetic Acid
  SITE 1: note = (R)-2-allylpyrrolidine-2-carboxylic acid, useful for stapling/stapled with another amino acid residue comprising an olefin group to form a staple through the olefin group
  SITE 3: note = (S)-2-amino-3-cyclohexylpropanoic acid
  VARIANT 4: note = 2-amino-2-(pent-4-en-1-yl)hept-6-enoic acid, useful for stapling/stapled with another amino acid residue comprising an olefin group to form a staple through one of the two olefin groups and/or with another amino acid residue comprising an olefin group to form a staple through the other of the two olefin groups
  SITE 6: note = (S)-3-(2-amino-2-carboxyethyl)benzoic acid
  SITE 7: note = 2-amino-2-methylpropanoic acid
  SITE 10: note = L-lysine, useful for stapling/stapled with another amino acid residue comprising a side chain acid group to form a staple through the 6-amino group
  SITE 11: note (S)-3-amino-1-((pent-4-en-1-yloxy)carbonyl)pyrrolidine-3-ca rboxylic acid, useful for stapling/stapled with another amino acid residue comprising an olefin group to form a staple through the olefin group
  SITE 12: note = (S)-2-amino-3-(2-chlorophenyl)propanoic acid
  SITE 13: note = (S)-2-amino-3-(benzo[b]thiophen-3-yl)propanoic acid
  SITE 14: note = L-glutamic acid, useful for stapling/stapled with another amino acid residue comprising a side chain amino group to form a staple through the 4-carboxyl group
  SITE 14: note = C-term amino
XDXXDXXAFKXXXE

SEQ ID NO: 1153 - protein, 14 aa, synthetic construct
  SITE 1: note = N-term Acetic Acid
  SITE 1: note = (R)-2-allylpyrrolidine-2-carboxylic acid, useful for stapling/stapled with another amino acid residue comprising an olefin group to form a staple through the olefin group
  SITE 3: note = (S)-2-amino-3-cyclohexylpropanoic acid
  VARIANT 4: note = 2-amino-2-(pent-4-en-1-yl)hept-6-enoic acid, useful for stapling/stapled with another amino acid residue comprising an olefin group to form a staple through one of the two olefin groups and/or with another amino acid residue comprising an olefin group to form a staple through the other of the two olefin groups
  SITE 6: note = (S)-3-(2-amino-2-carboxyethyl)benzoic acid
  SITE 10: note = L-lysine, useful for stapling/stapled with another amino acid residue comprising a side chain acid group to form a staple through the 6-amino group
  SITE 11: note (S)-3-amino-1-((pent-4-en-1-yloxy)carbonyl)pyrrolidine-3-ca rboxylic acid, useful for stapling/stapled with another amino acid residue comprising an olefin group to form a staple through the olefin group
  SITE 12: note = (S)-2-amino-3-(2-chlorophenyl)propanoic acid
  SITE 13: note = (S)-2-amino-3-(benzo[b]thiophen-3-yl)propanoic acid
  SITE 14: note = L-glutamic acid, useful for stapling/stapled with another amino acid residue comprising a side chain amino group to form a staple through the 4-carboxyl group
  SITE 14: note = C-term amino
XDXXDXAAFKXXXE

SEQ ID NO: 1154 - protein, 14 aa, synthetic construct
  SITE 1: note = N-term Acetic Acid
  SITE 1: note = (R)-2-allylpyrrolidine-2-carboxylic acid, useful for stapling/stapled with another amino acid residue comprising an olefin group to form a staple through the olefin group
  SITE 3: note = (S)-2-amino-3-cyclohexylpropanoic acid
  VARIANT 4: note = 2-amino-2-(pent-4-en-1-yl)hept-6-enoic acid, useful for stapling/stapled with another amino acid residue comprising an olefin group to form a staple through one of the two olefin groups and/or with another amino acid residue comprising an olefin group to form a staple through the other of the two olefin groups
  SITE 6: note = (S)-3-(2-amino-2-carboxyethyl)benzoic acid
  SITE 7: note = 1-aminocyclopentane-1-carboxylic acid
  SITE 10: note = L-lysine, useful for stapling/stapled with another amino acid residue comprising a side chain acid group to form a staple through the 6-amino group
  SITE 11: note (S)-3-amino-1-((pent-4-en-1-yloxy)carbonyl)pyrrolidine-3-ca rboxylic acid, useful for stapling/stapled with another amino acid residue comprising an olefin group to form a staple through the olefin group
  SITE 12: note = (S)-2-amino-3-(2-chlorophenyl)propanoic acid
  SITE 13: note = (S)-2-amino-3-(benzo[b]thiophen-3-yl)propanoic acid
  SITE 14: note = L-glutamic acid, useful for stapling/stapled with another amino acid residue comprising a side chain amino group to form a staple through the 4-carboxyl group
  SITE 14: note = C-term amino
XDXXDXXAFKXXXE

SEQ ID NO: 1155 - protein, 14 aa, synthetic construct
  SITE 1: note = N-term Acetic Acid
  SITE 1: note = (R)-2-allylpyrrolidine-2-carboxylic acid, useful for stapling/stapled with another amino acid residue comprising an olefin group to form a staple through the olefin group
  SITE 3: note = (S)-2-amino-2-cyclohexylacetic acid
  VARIANT 4: note = 2-amino-2-(pent-4-en-1-yl)hept-6-enoic acid, useful for stapling/stapled with another amino acid residue comprising an olefin group to form a staple through one of the two olefin groups and/or with another amino acid residue comprising an olefin group to form a staple through the other of the two olefin groups
  SITE 6: note = (S)-3-(2-amino-2-carboxyethyl)benzoic acid
  SITE 7: note = 2-amino-2-methylpropanoic acid
  SITE 10: note = L-lysine, useful for stapling/stapled with another amino acid residue comprising a side chain acid group to form a staple through the 6-amino group
  SITE 11: note (S)-3-amino-1-((pent-4-en-1-yloxy)carbonyl)pyrrolidine-3-ca rboxylic acid, useful for stapling/stapled with another amino acid residue comprising an olefin group to form a staple through the olefin group
  SITE 12: note = (S)-2-amino-3-(2-chlorophenyl)propanoic acid
  SITE 13: note = (S)-2-amino-3-(benzo[b]thiophen-3-yl)propanoic acid
  SITE 14: note = L-glutamic acid, useful for stapling/stapled with another amino acid residue comprising a side chain amino group to form a staple through the 4-carboxyl group
  SITE 14: note = C-term amino
XDXXDXXAFKXXXE

SEQ ID NO: 1156 - protein, 14 aa, synthetic construct
  SITE 1: note = N-term Acetic Acid
  SITE 1: note = (R)-2-allylpyrrolidine-2-carboxylic acid, useful for stapling/stapled with another amino acid residue comprising an olefin group to form a staple through the olefin group
  SITE 3: note = (S)-2-amino-2-cyclohexylacetic acid
  VARIANT 4: note = 2-amino-2-(pent-4-en-1-yl)hept-6-enoic acid, useful for stapling/stapled with another amino acid residue comprising an olefin group to form a staple through one of the two olefin groups and/or with another amino acid residue comprising an olefin group to form a staple through the other of the two olefin groups
  SITE 6: note = (S)-3-(2-amino-2-carboxyethyl)benzoic acid
  SITE 10: note = L-lysine, useful for stapling/stapled with another amino acid residue comprising a side chain acid group to form a staple through the 6-amino group
  SITE 11: note (S)-3-amino-1-((pent-4-en-1-yloxy)carbonyl)pyrrolidine-3-ca rboxylic acid, useful for stapling/stapled with another amino acid residue comprising an olefin group to form a staple through the olefin group
  SITE 12: note = (S)-2-amino-3-(2-chlorophenyl)propanoic acid
  SITE 13: note = (S)-2-amino-3-(benzo[b]thiophen-3-yl)propanoic acid
  SITE 14: note = L-glutamic acid, useful for stapling/stapled with another amino acid residue comprising a side chain amino group to form a staple through the 4-carboxyl group
  SITE 14: note = C-term amino
XDXXDXAAFKXXXE

SEQ ID NO: 1157 - protein, 14 aa, synthetic construct
  SITE 1: note = N-term Acetic Acid
  SITE 1: note = (R)-2-allylpyrrolidine-2-carboxylic acid, useful for stapling/stapled with another amino acid residue comprising an olefin group to form a staple through the olefin group
  SITE 3: note = (S)-2-amino-4,4-dimethylpentanoic acid
  VARIANT 4: note = 2-amino-2-(pent-4-en-1-yl)hept-6-enoic acid, useful for stapling/stapled with another amino acid residue comprising an olefin group to form a staple through one of the two olefin groups and/or with another amino acid residue comprising an olefin group to form a staple through the other of the two olefin groups
  SITE 6: note = (S)-3-(2-amino-2-carboxyethyl)benzoic acid
  SITE 7: note = 2-amino-2-methylpropanoic acid
  SITE 10: note = L-lysine, useful for stapling/stapled with another amino acid residue comprising a side chain acid group to form a staple through the 6-amino group
  SITE 11: note (S)-3-amino-1-((pent-4-en-1-yloxy)carbonyl)pyrrolidine-3-ca rboxylic acid, useful for stapling/stapled with another amino acid residue comprising an olefin group to form a staple through the olefin group
  SITE 12: note = (S)-2-amino-3,3-diphenylpropanoic acid
  SITE 13: note = (S)-2-amino-3-(3,4-dichlorophenyl)propanoic acid
  SITE 14: note = L-glutamic acid, useful for stapling/stapled with another amino acid residue comprising a side chain amino group to form a staple through the 4-carboxyl group
  SITE 14: note = C-term amino
XDXXDXXAFKXXXE

SEQ ID NO: 1158 - protein, 14 aa, synthetic construct
  SITE 1: note = N-term Acetic Acid
  SITE 1: note = (R)-2-allylpyrrolidine-2-carboxylic acid, useful for stapling/stapled with another amino acid residue comprising an olefin group to form a staple through the olefin group
  VARIANT 4: note = 2-amino-2-(pent-4-en-1-yl)hept-6-enoic acid, useful for stapling/stapled with another amino acid residue comprising an olefin group to form a staple through one of the two olefin groups and/or with another amino acid residue comprising an olefin group to form a staple through the other of the two olefin groups
  SITE 6: note = (S)-3-(2-amino-2-carboxyethyl)benzoic acid
  SITE 7: note = 2-amino-2-methylpropanoic acid
  SITE 10: note = L-lysine, useful for stapling/stapled with another amino acid residue comprising a side chain acid group to form a staple through the 6-amino group
  SITE 11: note (S)-3-amino-1-((pent-4-en-1-yloxy)carbonyl)pyrrolidine-3-ca rboxylic acid, useful for stapling/stapled with another amino acid residue comprising an olefin group to form a staple through the olefin group
  SITE 12: note = (S)-2-amino-3,3-diphenylpropanoic acid
  SITE 13: note = (S)-2-amino-3-(3,4-dichlorophenyl)propanoic acid
  SITE 14: note = L-glutamic acid, useful for stapling/stapled with another amino acid residue comprising a side chain amino group to form a staple through the 4-carboxyl group
  SITE 14: note = C-term amino
XDIXDXXAFKXXXE

SEQ ID NO: 1159 - protein, 14 aa, synthetic construct
  SITE 1: note = N-term Acetic Acid
  SITE 1: note = (R)-2-allylpyrrolidine-2-carboxylic acid, useful for stapling/stapled with another amino acid residue comprising an olefin group to form a staple through the olefin group
  SITE 3: note = (S)-2-amino-4,4-dimethylpentanoic acid
  VARIANT 4: note = 2-amino-2-(pent-4-en-1-yl)hept-6-enoic acid, useful for stapling/stapled with another amino acid residue comprising an olefin group to form a staple through one of the two olefin groups and/or with another amino acid residue comprising an olefin group to form a staple through the other of the two olefin groups
  SITE 6: note = (S)-3-(2-amino-2-carboxyethyl)benzoic acid
  SITE 7: note = 2-amino-2-methylpropanoic acid
  SITE 10: note = L-lysine, useful for stapling/stapled with another amino acid residue comprising a side chain acid group to form a staple through the 6-amino group
  SITE 11: note (S)-3-amino-1-((pent-4-en-1-yloxy)carbonyl)pyrrolidine-3-ca rboxylic acid, useful for stapling/stapled with another amino acid residue comprising an olefin group to form a staple through the olefin group
  SITE 12: note = (S)-2-amino-3,3-diphenylpropanoic acid
  SITE 13: note = (S)-2-amino-3-(benzo[b]thiophen-3-yl)propanoic acid
  SITE 14: note = L-glutamic acid, useful for stapling/stapled with another amino acid residue comprising a side chain amino group to form a staple through the 4-carboxyl group
  SITE 14: note = C-term amino
XDXXDXXAFKXXXE

SEQ ID NO: 1160 - protein, 14 aa, synthetic construct
  SITE 1: note = N-term Acetic Acid
  SITE 1: note = (R)-2-allylpyrrolidine-2-carboxylic acid, useful for stapling/stapled with another amino acid residue comprising an olefin group to form a staple through the olefin group
  SITE 3: note = (S)-2-amino-4,4-dimethylpentanoic acid
  VARIANT 4: note = 2-amino-2-(pent-4-en-1-yl)hept-6-enoic acid, useful for stapling/stapled with another amino acid residue comprising an olefin group to form a staple through one of the two olefin groups and/or with another amino acid residue comprising an olefin group to form a staple through the other of the two olefin groups
  SITE 6: note = (S)-3-(2-amino-2-carboxyethyl)benzoic acid
  SITE 7: note = 2-amino-2-methylpropanoic acid
  SITE 10: note = L-lysine, useful for stapling/stapled with another amino acid residue comprising a side chain acid group to form a staple through the 6-amino group
  SITE 11: note (S)-3-amino-1-((pent-4-en-1-yloxy)carbonyl)pyrrolidine-3-ca rboxylic acid, useful for stapling/stapled with another amino acid residue comprising an olefin group to form a staple through the olefin group
  SITE 12: note = (S)-2-amino-3-(2-fluorophenyl)propanoic acid
  SITE 13: note = (S)-2-amino-3-(3,4-dichlorophenyl)propanoic acid
  SITE 14: note = L-glutamic acid, useful for stapling/stapled with another amino acid residue comprising a side chain amino group to form a staple through the 4-carboxyl group
  SITE 14: note = C-term amino
XDXXDXXAFKXXXE

SEQ ID NO: 1161 - protein, 14 aa, synthetic construct
  SITE 1: note = N-term Acetic Acid
  SITE 1: note = (R)-2-allylpyrrolidine-2-carboxylic acid, useful for stapling/stapled with another amino acid residue comprising an olefin group to form a staple through the olefin group
  VARIANT 4: note = 2-amino-2-(pent-4-en-1-yl)hept-6-enoic acid, useful for stapling/stapled with another amino acid residue comprising an olefin group to form a staple through one of the two olefin groups and/or with another amino acid residue comprising an olefin group to form a staple through the other of the two olefin groups
  SITE 6: note = (S)-3-(2-amino-2-carboxyethyl)benzoic acid
  SITE 7: note = 2-amino-2-methylpropanoic acid
  SITE 10: note = L-lysine, useful for stapling/stapled with another amino acid residue comprising a side chain acid group to form a staple through the 6-amino group
  SITE 11: note (S)-3-amino-1-((pent-4-en-1-yloxy)carbonyl)pyrrolidine-3-ca rboxylic acid, useful for stapling/stapled with another amino acid residue comprising an olefin group to form a staple through the olefin group
  SITE 12: note = (S)-2-amino-3-(2-fluorophenyl)propanoic acid
  SITE 13: note = (S)-2-amino-3-(3,4-dichlorophenyl)propanoic acid
  SITE 14: note = L-glutamic acid, useful for stapling/stapled with another amino acid residue comprising a side chain amino group to form a staple through the 4-carboxyl group
  SITE 14: note = C-term amino
XDIXDXXAFKXXXE

SEQ ID NO: 1162 - protein, 14 aa, synthetic construct
  SITE 1: note = N-term Acetic Acid
  SITE 1: note = (R)-2-allylpyrrolidine-2-carboxylic acid, useful for stapling/stapled with another amino acid residue comprising an olefin group to form a staple through the olefin group
  SITE 3: note = (S)-2-amino-4,4-dimethylpentanoic acid
  VARIANT 4: note = 2-amino-2-(pent-4-en-1-yl)hept-6-enoic acid, useful for stapling/stapled with another amino acid residue comprising an olefin group to form a staple through one of the two olefin groups and/or with another amino acid residue comprising an olefin group to form a staple through the other of the two olefin groups
  SITE 6: note = (S)-3-(2-amino-2-carboxyethyl)benzoic acid
  SITE 7: note = 2-amino-2-methylpropanoic acid
  SITE 10: note = L-lysine, useful for stapling/stapled with another amino acid residue comprising a side chain acid group to form a staple through the 6-amino group
  SITE 11: note (S)-3-amino-1-((pent-4-en-1-yloxy)carbonyl)pyrrolidine-3-ca rboxylic acid, useful for stapling/stapled with another amino acid residue comprising an olefin group to form a staple through the olefin group
  SITE 12: note = (S)-2-amino-3-(2-fluorophenyl)propanoic acid
  SITE 13: note = (S)-2-amino-3-(benzo[b]thiophen-3-yl)propanoic acid
  SITE 14: note = L-glutamic acid, useful for stapling/stapled with another amino acid residue comprising a side chain amino group to form a staple through the 4-carboxyl group
  SITE 14: note = C-term amino
XDXXDXXAFKXXXE

SEQ ID NO: 1163 - protein, 14 aa, synthetic construct
  SITE 1: note = N-term Acetic Acid
  SITE 1: note = (R)-2-allylpyrrolidine-2-carboxylic acid, useful for stapling/stapled with another amino acid residue comprising an olefin group to form a staple through the olefin group
  VARIANT 4: note = 2-amino-2-(pent-4-en-1-yl)hept-6-enoic acid, useful for stapling/stapled with another amino acid residue comprising an olefin group to form a staple through one of the two olefin groups and/or with another amino acid residue comprising an olefin group to form a staple through the other of the two olefin groups
  SITE 6: note = (S)-3-(2-amino-2-carboxyethyl)benzoic acid
  SITE 7: note = 2-amino-2-methylpropanoic acid
  SITE 10: note = L-lysine, useful for stapling/stapled with another amino acid residue comprising a side chain acid group to form a staple through the 6-amino group
  SITE 11: note (S)-3-amino-1-((pent-4-en-1-yloxy)carbonyl)pyrrolidine-3-ca rboxylic acid, useful for stapling/stapled with another amino acid residue comprising an olefin group to form a staple through the olefin group
  SITE 12: note = (S)-2-amino-3-(2-fluorophenyl)propanoic acid
  SITE 13: note = (S)-2-amino-3-(benzo[b]thiophen-3-yl)propanoic acid
  SITE 14: note = L-glutamic acid, useful for stapling/stapled with another amino acid residue comprising a side chain amino group to form a staple through the 4-carboxyl group
  SITE 14: note = C-term amino
XDIXDXXAFKXXXE

SEQ ID NO: 1164 - protein, 14 aa, synthetic construct
  SITE 1: note = N-term Acetic Acid
  SITE 1: note = (R)-2-allylpyrrolidine-2-carboxylic acid, useful for stapling/stapled with another amino acid residue comprising an olefin group to form a staple through the olefin group
  SITE 3: note = (S)-2-amino-4,4-dimethylpentanoic acid
  VARIANT 4: note = 2-amino-2-(pent-4-en-1-yl)hept-6-enoic acid, useful for stapling/stapled with another amino acid residue comprising an olefin group to form a staple through one of the two olefin groups and/or with another amino acid residue comprising an olefin group to form a staple through the other of the two olefin groups
  SITE 6: note = (S)-3-(2-amino-2-carboxyethyl)benzoic acid
  SITE 7: note = 2-amino-2-methylpropanoic acid
  SITE 10: note = L-lysine, useful for stapling/stapled with another amino acid residue comprising a side chain acid group to form a staple through the 6-amino group
  SITE 11: note (S)-3-amino-1-((pent-4-en-1-yloxy)carbonyl)pyrrolidine-3-ca rboxylic acid, useful for stapling/stapled with another amino acid residue comprising an olefin group to form a staple through the olefin group
  SITE 12: note = (S)-2-amino-3-(o-tolyl)propanoic acid
  SITE 13: note = (S)-2-amino-3-(benzo[b]thiophen-3-yl)propanoic acid
  SITE 14: note = L-glutamic acid, useful for stapling/stapled with another amino acid residue comprising a side chain amino group to form a staple through the 4-carboxyl group
  SITE 14: note = C-term amino
XDXXDXXAFKXXXE

SEQ ID NO: 1165 - protein, 14 aa, synthetic construct
  SITE 1: note = N-term Acetic Acid
  SITE 1: note = (R)-2-allylpyrrolidine-2-carboxylic acid, useful for stapling/stapled with another amino acid residue comprising an olefin group to form a staple through the olefin group
  VARIANT 4: note = 2-amino-2-(pent-4-en-1-yl)hept-6-enoic acid, useful for stapling/stapled with another amino acid residue comprising an olefin group to form a staple through one of the two olefin groups and/or with another amino acid residue comprising an olefin group to form a staple through the other of the two olefin groups
  SITE 6: note = (S)-3-(2-amino-2-carboxyethyl)benzoic acid
  SITE 7: note = 2-amino-2-methylpropanoic acid
  SITE 10: note = L-lysine, useful for stapling/stapled with another amino acid residue comprising a side chain acid group to form a staple through the 6-amino group
  SITE 11: note (S)-3-amino-1-((pent-4-en-1-yloxy)carbonyl)pyrrolidine-3-ca rboxylic acid, useful for stapling/stapled with another amino acid residue comprising an olefin group to form a staple through the olefin group
  SITE 12: note = (S)-2-amino-3-(o-tolyl)propanoic acid
  SITE 13: note = (S)-2-amino-3-(benzo[b]thiophen-3-yl)propanoic acid
  SITE 14: note = L-glutamic acid, useful for stapling/stapled with another amino acid residue comprising a side chain amino group to form a staple through the 4-carboxyl group
  SITE 14: note = C-term amino
XDIXDXXAFKXXXE

SEQ ID NO: 1166 - protein, 13 aa, synthetic construct
  SITE 1: note = N-term (R)-2-methyl-2-(2-oxopyrrolidin-1-yl)pent-4-enoic acid, useful for stapling/stapled with another amino acid residue comprising an olefin group to form a staple through the olefin group
  SITE 2: note = (S)-2-amino-4,4-dimethylpentanoic acid
  VARIANT 3: note = 2-amino-2-(pent-4-en-1-yl)hept-6-enoic acid, useful for stapling/stapled with another amino acid residue comprising an olefin group to form a staple through one of the two olefin groups and/or with another amino acid residue comprising an olefin group to form a staple through the other of the two olefin groups
  SITE 5: note = (S)-3-(2-amino-2-carboxyethyl)benzoic acid
  SITE 6: note = 2-amino-2-methylpropanoic acid
  SITE 9: note = L-lysine, useful for stapling/stapled with another amino acid residue comprising a side chain acid group to form a staple through the 6-amino group
  SITE 10: note (S)-3-amino-1-((pent-4-en-1-yloxy)carbonyl)pyrrolidine-3-ca rboxylic acid, useful for stapling/stapled with another amino acid residue comprising an olefin group to form a staple through the olefin group
  SITE 11: note = (S)-2-amino-3-(thiophen-3-yl)propanoic acid
  SITE 12: note = (S)-2-amino-3-(3,4-dichlorophenyl)propanoic acid
  SITE 13: note = L-glutamic acid, useful for stapling/stapled with another amino acid residue comprising a side chain amino group to form a staple through the 4-carboxyl group
  SITE 13: note = C-term amino
DXXDXXAFKXXXE

SEQ ID NO: 1167 - protein, 13 aa, synthetic construct
  SITE 1: note = N-term (R)-2-methyl-2-(2-oxopyrrolidin-1-yl)pent-4-enoic acid, useful for stapling/stapled with another amino acid residue comprising an olefin group to form a staple through the olefin group
  VARIANT 3: note = 2-amino-2-(pent-4-en-1-yl)hept-6-enoic acid, useful for stapling/stapled with another amino acid residue comprising an olefin group to form a staple through one of the two olefin groups and/or with another amino acid residue comprising an olefin group to form a staple through the other of the two olefin groups
  SITE 5: note = (S)-3-(2-amino-2-carboxyethyl)benzoic acid
  SITE 6: note = 2-amino-2-methylpropanoic acid
  SITE 9: note = L-lysine, useful for stapling/stapled with another amino acid residue comprising a side chain acid group to form a staple through the 6-amino group
  SITE 10: note (S)-3-amino-1-((pent-4-en-1-yloxy)carbonyl)pyrrolidine-3-ca rboxylic acid, useful for stapling/stapled with another amino acid residue comprising an olefin group to form a staple through the olefin group
  SITE 11: note = (S)-2-amino-3-(thiophen-3-yl)propanoic acid
  SITE 12: note = (S)-2-amino-3-(3,4-dichlorophenyl)propanoic acid
  SITE 13: note = L-glutamic acid, useful for stapling/stapled with another amino acid residue comprising a side chain amino group to form a staple through the 4-carboxyl group
  SITE 13: note = C-term amino
DAXDXXAFKXXXE

SEQ ID NO: 1168 - protein, 13 aa, synthetic construct
  SITE 1: note = N-term (R)-2-methyl-2-(2-oxopyrrolidin-1-yl)pent-4-enoic acid, useful for stapling/stapled with another amino acid residue comprising an olefin group to form a staple through the olefin group
  VARIANT 3: note = 2-amino-2-(pent-4-en-1-yl)hept-6-enoic acid, useful for stapling/stapled with another amino acid residue comprising an olefin group to form a staple through one of the two olefin groups and/or with another amino acid residue comprising an olefin group to form a staple through the other of the two olefin groups
  SITE 5: note = (S)-3-(2-amino-2-carboxyethyl)benzoic acid
  SITE 6: note = 2-amino-2-methylpropanoic acid
  SITE 9: note = L-lysine, useful for stapling/stapled with another amino acid residue comprising a side chain acid group to form a staple through the 6-amino group
  SITE 10: note (S)-3-amino-1-((pent-4-en-1-yloxy)carbonyl)pyrrolidine-3-ca rboxylic acid, useful for stapling/stapled with another amino acid residue comprising an olefin group to form a staple through the olefin group
  SITE 11: note = (S)-2-amino-3-(thiophen-3-yl)propanoic acid
  SITE 12: note = (S)-2-amino-3-(3,4-dichlorophenyl)propanoic acid
  SITE 13: note = L-glutamic acid, useful for stapling/stapled with another amino acid residue comprising a side chain amino group to form a staple through the 4-carboxyl group
  SITE 13: note = C-term amino
DIXDXXAFKXXXE

SEQ ID NO: 1169 - protein, 13 aa, synthetic construct
  SITE 1: note = N-term (R)-2-methyl-2-(2-oxopyrrolidin-1-yl)pent-4-enoic acid, useful for stapling/stapled with another amino acid residue comprising an olefin group to form a staple through the olefin group
  VARIANT 3: note = 2-amino-2-(pent-4-en-1-yl)hept-6-enoic acid, useful for stapling/stapled with another amino acid residue comprising an olefin group to form a staple through one of the two olefin groups and/or with another amino acid residue comprising an olefin group to form a staple through the other of the two olefin groups
  SITE 5: note = (S)-3-(2-amino-2-carboxyethyl)benzoic acid
  SITE 6: note = 2-amino-2-methylpropanoic acid
  SITE 9: note = L-lysine, useful for stapling/stapled with another amino acid residue comprising a side chain acid group to form a staple through the 6-amino group
  SITE 10: note (S)-3-amino-1-((pent-4-en-1-yloxy)carbonyl)pyrrolidine-3-ca rboxylic acid, useful for stapling/stapled with another amino acid residue comprising an olefin group to form a staple through the olefin group
  SITE 11: note = (S)-2-amino-3-(thiophen-3-yl)propanoic acid
  SITE 12: note = (S)-2-amino-3-(3,4-dichlorophenyl)propanoic acid
  SITE 13: note = L-glutamic acid, useful for stapling/stapled with another amino acid residue comprising a side chain amino group to form a staple through the 4-carboxyl group
  SITE 13: note = C-term amino
DVXDXXAFKXXXE

SEQ ID NO: 1170 - protein, 13 aa, synthetic construct
  SITE 1: note = N-term (R)-2-methyl-2-(2-oxopyrrolidin-1-yl)pent-4-enoic acid, useful for stapling/stapled with another amino acid residue comprising an olefin group to form a staple through the olefin group
  VARIANT 3: note = 2-amino-2-(pent-4-en-1-yl)hept-6-enoic acid, useful for stapling/stapled with another amino acid residue comprising an olefin group to form a staple through one of the two olefin groups and/or with another amino acid residue comprising an olefin group to form a staple through the other of the two olefin groups
  SITE 5: note = (S)-3-(2-amino-2-carboxyethyl)benzoic acid
  SITE 6: note = 2-amino-2-methylpropanoic acid
  SITE 9: note = L-lysine, useful for stapling/stapled with another amino acid residue comprising a side chain acid group to form a staple through the 6-amino group
  SITE 10: note (S)-3-amino-1-((pent-4-en-1-yloxy)carbonyl)pyrrolidine-3-ca rboxylic acid, useful for stapling/stapled with another amino acid residue comprising an olefin group to form a staple through the olefin group
  SITE 11: note = (S)-2-amino-3-(thiophen-3-yl)propanoic acid
  SITE 12: note = (S)-2-amino-3-(3,4-dichlorophenyl)propanoic acid
  SITE 13: note = L-glutamic acid, useful for stapling/stapled with another amino acid residue comprising a side chain amino group to form a staple through the 4-carboxyl group
  SITE 13: note = C-term amino
DLXDXXAFKXXXE

SEQ ID NO: 1171 - protein, 13 aa, synthetic construct
  SITE 1: note = N-term (R)-2-methyl-2-(2-oxopyrrolidin-1-yl)pent-4-enoic acid, useful for stapling/stapled with another amino acid residue comprising an olefin group to form a staple through the olefin group
  VARIANT 3: note = 2-amino-2-(pent-4-en-1-yl)hept-6-enoic acid, useful for stapling/stapled with another amino acid residue comprising an olefin group to form a staple through one of the two olefin groups and/or with another amino acid residue comprising an olefin group to form a staple through the other of the two olefin groups
  SITE 5: note = (S)-3-(2-amino-2-carboxyethyl)benzoic acid
  SITE 6: note = 2-amino-2-methylpropanoic acid
  SITE 9: note = L-lysine, useful for stapling/stapled with another amino acid residue comprising a side chain acid group to form a staple through the 6-amino group
  SITE 10: note (S)-3-amino-1-((pent-4-en-1-yloxy)carbonyl)pyrrolidine-3-ca rboxylic acid, useful for stapling/stapled with another amino acid residue comprising an olefin group to form a staple through the olefin group
  SITE 11: note = (S)-2-amino-3-(thiophen-3-yl)propanoic acid
  SITE 12: note = (S)-2-amino-3-(3,4-dichlorophenyl)propanoic acid
  SITE 13: note = L-glutamic acid, useful for stapling/stapled with another amino acid residue comprising a side chain amino group to form a staple through the 4-carboxyl group
  SITE 13: note = C-term amino
DFXDXXAFKXXXE

SEQ ID NO: 1172 - protein, 13 aa, synthetic construct
  SITE 1: note = N-term (R)-2-methyl-2-(2-oxopyrrolidin-1-yl)pent-4-enoic acid, useful for stapling/stapled with another amino acid residue comprising an olefin group to form a staple through the olefin group
  SITE 2: note = (S)-2-amino-2-cyclohexylacetic acid
  VARIANT 3: note = 2-amino-2-(pent-4-en-1-yl)hept-6-enoic acid, useful for stapling/stapled with another amino acid residue comprising an olefin group to form a staple through one of the two olefin groups and/or with another amino acid residue comprising an olefin group to form a staple through the other of the two olefin groups
  SITE 5: note = (S)-3-(2-amino-2-carboxyethyl)benzoic acid
  SITE 6: note = 2-amino-2-methylpropanoic acid
  SITE 9: note = L-lysine, useful for stapling/stapled with another amino acid residue comprising a side chain acid group to form a staple through the 6-amino group
  SITE 10: note (S)-3-amino-1-((pent-4-en-1-yloxy)carbonyl)pyrrolidine-3-ca rboxylic acid, useful for stapling/stapled with another amino acid residue comprising an olefin group to form a staple through the olefin group
  SITE 11: note = (S)-2-amino-3-(thiophen-3-yl)propanoic acid
  SITE 12: note = (S)-2-amino-3-(3,4-dichlorophenyl)propanoic acid
  SITE 13: note = L-glutamic acid, useful for stapling/stapled with another amino acid residue comprising a side chain amino group to form a staple through the 4-carboxyl group
  SITE 13: note = C-term amino
DXXDXXAFKXXXE

SEQ ID NO: 1173 - protein, 13 aa, synthetic construct
  SITE 1: note = N-term (R)-2-methyl-2-(2-oxopyrrolidin-1-yl)pent-4-enoic acid, useful for stapling/stapled with another amino acid residue comprising an olefin group to form a staple through the olefin group
  SITE 2: note = (S)-2-amino-3-cyclohexylpropanoic acid
  VARIANT 3: note = 2-amino-2-(pent-4-en-1-yl)hept-6-enoic acid, useful for stapling/stapled with another amino acid residue comprising an olefin group to form a staple through one of the two olefin groups and/or with another amino acid residue comprising an olefin group to form a staple through the other of the two olefin groups
  SITE 5: note = (S)-3-(2-amino-2-carboxyethyl)benzoic acid
  SITE 6: note = 2-amino-2-methylpropanoic acid
  SITE 9: note = L-lysine, useful for stapling/stapled with another amino acid residue comprising a side chain acid group to form a staple through the 6-amino group
  SITE 10: note (S)-3-amino-1-((pent-4-en-1-yloxy)carbonyl)pyrrolidine-3-ca rboxylic acid, useful for stapling/stapled with another amino acid residue comprising an olefin group to form a staple through the olefin group
  SITE 11: note = (S)-2-amino-3-(thiophen-3-yl)propanoic acid
  SITE 12: note = (S)-2-amino-3-(3,4-dichlorophenyl)propanoic acid
  SITE 13: note = L-glutamic acid, useful for stapling/stapled with another amino acid residue comprising a side chain amino group to form a staple through the 4-carboxyl group
  SITE 13: note = C-term amino
DXXDXXAFKXXXE

SEQ ID NO: 1174 - protein, 13 aa, synthetic construct
  SITE 1: note = N-term (R)-2-methyl-2-(2-oxopyrrolidin-1-yl)pent-4-enoic acid, useful for stapling/stapled with another amino acid residue comprising an olefin group to form a staple through the olefin group
  SITE 2: note = (S)-2-amino-3,3-diphenylpropanoic acid
  VARIANT 3: note = 2-amino-2-(pent-4-en-1-yl)hept-6-enoic acid, useful for stapling/stapled with another amino acid residue comprising an olefin group to form a staple through one of the two olefin groups and/or with another amino acid residue comprising an olefin group to form a staple through the other of the two olefin groups
  SITE 5: note = (S)-3-(2-amino-2-carboxyethyl)benzoic acid
  SITE 6: note = 2-amino-2-methylpropanoic acid
  SITE 9: note = L-lysine, useful for stapling/stapled with another amino acid residue comprising a side chain acid group to form a staple through the 6-amino group
  SITE 10: note (S)-3-amino-1-((pent-4-en-1-yloxy)carbonyl)pyrrolidine-3-ca rboxylic acid, useful for stapling/stapled with another amino acid residue comprising an olefin group to form a staple through the olefin group
  SITE 11: note = (S)-2-amino-3-(thiophen-3-yl)propanoic acid
  SITE 12: note = (S)-2-amino-3-(3,4-dichlorophenyl)propanoic acid
  SITE 13: note = L-glutamic acid, useful for stapling/stapled with another amino acid residue comprising a side chain amino group to form a staple through the 4-carboxyl group
  SITE 13: note = C-term amino
DXXDXXAFKXXXE

SEQ ID NO: 1175 - protein, 13 aa, synthetic construct
  SITE 1: note = N-term (R)-2-methyl-2-(2-oxopyrrolidin-1-yl)pent-4-enoic acid, useful for stapling/stapled with another amino acid residue comprising an olefin group to form a staple through the olefin group
  SITE 2: note = (S)-2-amino-4,4-dimethylpentanoic acid
  VARIANT 3: note = 2-amino-2-(pent-4-en-1-yl)hept-6-enoic acid, useful for stapling/stapled with another amino acid residue comprising an olefin group to form a staple through one of the two olefin groups and/or with another amino acid residue comprising an olefin group to form a staple through the other of the two olefin groups
  SITE 5: note = (S)-3-(2-amino-2-carboxyethyl)benzoic acid
  SITE 6: note = 2-amino-2-methylpropanoic acid
  SITE 9: note = L-lysine, useful for stapling/stapled with another amino acid residue comprising a side chain acid group to form a staple through the 6-amino group
  SITE 10: note (S)-3-amino-1-((pent-4-en-1-yloxy)carbonyl)pyrrolidine-3-ca rboxylic acid, useful for stapling/stapled with another amino acid residue comprising an olefin group to form a staple through the olefin group
  SITE 11: note = (S)-2-amino-3-(thiophen-3-yl)propanoic acid
  SITE 12: note = (S)-2-amino-3-(3,4-dichlorophenyl)propanoic acid
  SITE 13: note = L-glutamic acid, useful for stapling/stapled with another amino acid residue comprising a side chain amino group to form a staple through the 4-carboxyl group
  SITE 13: note = C-term amino
NXXDXXAFKXXXE

SEQ ID NO: 1176 - protein, 13 aa, synthetic construct
  SITE 1: note = N-term (R)-2-methyl-2-(2-oxopyrrolidin-1-yl)pent-4-enoic acid, useful for stapling/stapled with another amino acid residue comprising an olefin group to form a staple through the olefin group
  SITE 2: note = (S)-2-amino-4,4-dimethylpentanoic acid
  VARIANT 3: note = 2-amino-2-(pent-4-en-1-yl)hept-6-enoic acid, useful for stapling/stapled with another amino acid residue comprising an olefin group to form a staple through one of the two olefin groups and/or with another amino acid residue comprising an olefin group to form a staple through the other of the two olefin groups
  SITE 5: note = (S)-3-(2-amino-2-carboxyethyl)benzoic acid
  SITE 6: note = 2-amino-2-methylpropanoic acid
  SITE 9: note = L-lysine, useful for stapling/stapled with another amino acid residue comprising a side chain acid group to form a staple through the 6-amino group
  SITE 10: note (S)-3-amino-1-((pent-4-en-1-yloxy)carbonyl)pyrrolidine-3-ca rboxylic acid, useful for stapling/stapled with another amino acid residue comprising an olefin group to form a staple through the olefin group
  SITE 11: note = (S)-2-amino-3-(thiophen-3-yl)propanoic acid
  SITE 12: note = (S)-2-amino-3-(3,4-dichlorophenyl)propanoic acid
  SITE 13: note = L-glutamic acid, useful for stapling/stapled with another amino acid residue comprising a side chain amino group to form a staple through the 4-carboxyl group
  SITE 13: note = C-term amino
SXXDXXAFKXXXE

SEQ ID NO: 1177 - protein, 13 aa, synthetic construct
  SITE 1: note = N-term (R)-2-methyl-2-(2-oxopyrrolidin-1-yl)pent-4-enoic acid, useful for stapling/stapled with another amino acid residue comprising an olefin group to form a staple through the olefin group
  SITE 2: note = (S)-2-amino-4,4-dimethylpentanoic acid
  VARIANT 3: note = 2-amino-2-(pent-4-en-1-yl)hept-6-enoic acid, useful for stapling/stapled with another amino acid residue comprising an olefin group to form a staple through one of the two olefin groups and/or with another amino acid residue comprising an olefin group to form a staple through the other of the two olefin groups
  SITE 5: note = (S)-3-(2-amino-2-carboxyethyl)benzoic acid
  SITE 9: note = L-lysine, useful for stapling/stapled with another amino acid residue comprising a side chain acid group to form a staple through the 6-amino group
  SITE 10: note (S)-3-amino-1-((pent-4-en-1-yloxy)carbonyl)pyrrolidine-3-ca rboxylic acid, useful for stapling/stapled with another amino acid residue comprising an olefin group to form a staple through the olefin group
  SITE 11: note = (S)-2-amino-3-(thiophen-3-yl)propanoic acid
  SITE 12: note = (S)-2-amino-3-(3,4-dichlorophenyl)propanoic acid
  SITE 13: note = L-glutamic acid, useful for stapling/stapled with another amino acid residue comprising a side chain amino group to form a staple through the 4-carboxyl group
  SITE 13: note = C-term amino
DXXDXAAFKXXXE

SEQ ID NO: 1178 - protein, 14 aa, synthetic construct
  SITE 1: note = N-term propionic acid
  SITE 1: note = (R)-2-allylpyrrolidine-2-carboxylic acid, useful for stapling/stapled with another amino acid residue comprising an olefin group to form a staple through the olefin group
  SITE 3: note = (S)-2-amino-4,4-dimethylpentanoic acid
  VARIANT 4: note = 2-amino-2-(pent-4-en-1-yl)hept-6-enoic acid, useful for stapling/stapled with another amino acid residue comprising an olefin group to form a staple through one of the two olefin groups and/or with another amino acid residue comprising an olefin group to form a staple through the other of the two olefin groups
  SITE 6: note = (S)-3-(2-amino-2-carboxyethyl)benzoic acid
  SITE 7: note = 2-amino-2-methylpropanoic acid
  SITE 10: note = L-lysine, useful for stapling/stapled with another amino acid residue comprising a side chain acid group to form a staple through the 6-amino group
  SITE 11: note (S)-3-amino-1-((pent-4-en-1-yloxy)carbonyl)pyrrolidine-3-ca rboxylic acid, useful for stapling/stapled with another amino acid residue comprising an olefin group to form a staple through the olefin group
  SITE 13: note = (S)-2-amino-3-(3,4-dichlorophenyl)propanoic acid
  SITE 14: note = L-glutamic acid, useful for stapling/stapled with another amino acid residue comprising a side chain amino group to form a staple through the 4-carboxyl group
  SITE 14: note = C-term amino
XDXXDXXAFKXFXE

SEQ ID NO: 1179 - protein, 14 aa, synthetic construct
  SITE 1: note = N-term butyric acid
  SITE 1: note = (R)-2-allylpyrrolidine-2-carboxylic acid, useful for stapling/stapled with another amino acid residue comprising an olefin group to form a staple through the olefin group
  SITE 3: note = (S)-2-amino-4,4-dimethylpentanoic acid
  VARIANT 4: note = 2-amino-2-(pent-4-en-1-yl)hept-6-enoic acid, useful for stapling/stapled with another amino acid residue comprising an olefin group to form a staple through one of the two olefin groups and/or with another amino acid residue comprising an olefin group to form a staple through the other of the two olefin groups
  SITE 6: note = (S)-3-(2-amino-2-carboxyethyl)benzoic acid
  SITE 7: note = 2-amino-2-methylpropanoic acid
  SITE 10: note = L-lysine, useful for stapling/stapled with another amino acid residue comprising a side chain acid group to form a staple through the 6-amino group
  SITE 11: note (S)-3-amino-1-((pent-4-en-1-yloxy)carbonyl)pyrrolidine-3-ca rboxylic acid, useful for stapling/stapled with another amino acid residue comprising an olefin group to form a staple through the olefin group
  SITE 13: note = (S)-2-amino-3-(3,4-dichlorophenyl)propanoic acid
  SITE 14: note = L-glutamic acid, useful for stapling/stapled with another amino acid residue comprising a side chain amino group to form a staple through the 4-carboxyl group
  SITE 14: note = C-term amino
XDXXDXXAFKXFXE

SEQ ID NO: 1180 - protein, 14 aa, synthetic construct
  SITE 1: note = N-term isobutyric acid
  SITE 1: note = (R)-2-allylpyrrolidine-2-carboxylic acid, useful for stapling/stapled with another amino acid residue comprising an olefin group to form a staple through the olefin group
  SITE 3: note = (S)-2-amino-4,4-dimethylpentanoic acid
  VARIANT 4: note = 2-amino-2-(pent-4-en-1-yl)hept-6-enoic acid, useful for stapling/stapled with another amino acid residue comprising an olefin group to form a staple through one of the two olefin groups and/or with another amino acid residue comprising an olefin group to form a staple through the other of the two olefin groups
  SITE 6: note = (S)-3-(2-amino-2-carboxyethyl)benzoic acid
  SITE 7: note = 2-amino-2-methylpropanoic acid
  SITE 10: note = L-lysine, useful for stapling/stapled with another amino acid residue comprising a side chain acid group to form a staple through the 6-amino group
  SITE 11: note (S)-3-amino-1-((pent-4-en-1-yloxy)carbonyl)pyrrolidine-3-ca rboxylic acid, useful for stapling/stapled with another amino acid residue comprising an olefin group to form a staple through the olefin group
  SITE 13: note = (S)-2-amino-3-(3,4-dichlorophenyl)propanoic acid
  SITE 14: note = L-glutamic acid, useful for stapling/stapled with another amino acid residue comprising a side chain amino group to form a staple through the 4-carboxyl group
  SITE 14: note = C-term amino
XDXXDXXAFKXFXE

SEQ ID NO: 1181 - protein, 14 aa, synthetic construct
  SITE 1: note = N-term cyclopropanecarboxylic acid
  SITE 1: note = (R)-2-allylpyrrolidine-2-carboxylic acid, useful for stapling/stapled with another amino acid residue comprising an olefin group to form a staple through the olefin group
  SITE 3: note = (S)-2-amino-4,4-dimethylpentanoic acid
  VARIANT 4: note = 2-amino-2-(pent-4-en-1-yl)hept-6-enoic acid, useful for stapling/stapled with another amino acid residue comprising an olefin group to form a staple through one of the two olefin groups and/or with another amino acid residue comprising an olefin group to form a staple through the other of the two olefin groups
  SITE 6: note = (S)-3-(2-amino-2-carboxyethyl)benzoic acid
  SITE 7: note = 2-amino-2-methylpropanoic acid
  SITE 10: note = L-lysine, useful for stapling/stapled with another amino acid residue comprising a side chain acid group to form a staple through the 6-amino group
  SITE 11: note (S)-3-amino-1-((pent-4-en-1-yloxy)carbonyl)pyrrolidine-3-ca rboxylic acid, useful for stapling/stapled with another amino acid residue comprising an olefin group to form a staple through the olefin group
  SITE 13: note = (S)-2-amino-3-(3,4-dichlorophenyl)propanoic acid
  SITE 14: note = L-glutamic acid, useful for stapling/stapled with another amino acid residue comprising a side chain amino group to form a staple through the 4-carboxyl group
  SITE 14: note = C-term amino
XDXXDXXAFKXFXE

SEQ ID NO: 1182 - protein, 14 aa, synthetic construct
  SITE 1: note = N-term cyclobutanecarboxylic acid
  SITE 1: note = (R)-2-allylpyrrolidine-2-carboxylic acid, useful for stapling/stapled with another amino acid residue comprising an olefin group to form a staple through the olefin group
  SITE 3: note = (S)-2-amino-4,4-dimethylpentanoic acid
  VARIANT 4: note = 2-amino-2-(pent-4-en-1-yl)hept-6-enoic acid, useful for stapling/stapled with another amino acid residue comprising an olefin group to form a staple through one of the two olefin groups and/or with another amino acid residue comprising an olefin group to form a staple through the other of the two olefin groups
  SITE 6: note = (S)-3-(2-amino-2-carboxyethyl)benzoic acid
  SITE 7: note = 2-amino-2-methylpropanoic acid
  SITE 10: note = L-lysine, useful for stapling/stapled with another amino acid residue comprising a side chain acid group to form a staple through the 6-amino group
  SITE 11: note (S)-3-amino-1-((pent-4-en-1-yloxy)carbonyl)pyrrolidine-3-ca rboxylic acid, useful for stapling/stapled with another amino acid residue comprising an olefin group to form a staple through the olefin group
  SITE 13: note = (S)-2-amino-3-(3,4-dichlorophenyl)propanoic acid
  SITE 14: note = L-glutamic acid, useful for stapling/stapled with another amino acid residue comprising a side chain amino group to form a staple through the 4-carboxyl group
  SITE 14: note = C-term amino
XDXXDXXAFKXFXE

SEQ ID NO: 1183 - protein, 14 aa, synthetic construct
  SITE 1: note = N-term cyclopentanecarboxylic acid
  SITE 1: note = (R)-2-allylpyrrolidine-2-carboxylic acid, useful for stapling/stapled with another amino acid residue comprising an olefin group to form a staple through the olefin group
  SITE 3: note = (S)-2-amino-4,4-dimethylpentanoic acid
  VARIANT 4: note = 2-amino-2-(pent-4-en-1-yl)hept-6-enoic acid, useful for stapling/stapled with another amino acid residue comprising an olefin group to form a staple through one of the two olefin groups and/or with another amino acid residue comprising an olefin group to form a staple through the other of the two olefin groups
  SITE 6: note = (S)-3-(2-amino-2-carboxyethyl)benzoic acid
  SITE 7: note = 2-amino-2-methylpropanoic acid
  SITE 10: note = L-lysine, useful for stapling/stapled with another amino acid residue comprising a side chain acid group to form a staple through the 6-amino group
  SITE 11: note (S)-3-amino-1-((pent-4-en-1-yloxy)carbonyl)pyrrolidine-3-ca rboxylic acid, useful for stapling/stapled with another amino acid residue comprising an olefin group to form a staple through the olefin group
  SITE 13: note = (S)-2-amino-3-(3,4-dichlorophenyl)propanoic acid
  SITE 14: note = L-glutamic acid, useful for stapling/stapled with another amino acid residue comprising a side chain amino group to form a staple through the 4-carboxyl group
  SITE 14: note = C-term amino
XDXXDXXAFKXFXE

SEQ ID NO: 1184 - protein, 14 aa, synthetic construct
  SITE 1: note = N-term tetrahydro-2H-pyran-4-carboxylic acid
  SITE 1: note = (R)-2-allylpyrrolidine-2-carboxylic acid, useful for stapling/stapled with another amino acid residue comprising an olefin group to form a staple through the olefin group
  SITE 3: note = (S)-2-amino-4,4-dimethylpentanoic acid
  VARIANT 4: note = 2-amino-2-(pent-4-en-1-yl)hept-6-enoic acid, useful for stapling/stapled with another amino acid residue comprising an olefin group to form a staple through one of the two olefin groups and/or with another amino acid residue comprising an olefin group to form a staple through the other of the two olefin groups
  SITE 6: note = (S)-3-(2-amino-2-carboxyethyl)benzoic acid
  SITE 7: note = 2-amino-2-methylpropanoic acid
  SITE 10: note = L-lysine, useful for stapling/stapled with another amino acid residue comprising a side chain acid group to form a staple through the 6-amino group
  SITE 11: note (S)-3-amino-1-((pent-4-en-1-yloxy)carbonyl)pyrrolidine-3-ca rboxylic acid, useful for stapling/stapled with another amino acid residue comprising an olefin group to form a staple through the olefin group
  SITE 13: note = (S)-2-amino-3-(3,4-dichlorophenyl)propanoic acid
  SITE 14: note = L-glutamic acid, useful for stapling/stapled with another amino acid residue comprising a side chain amino group to form a staple through the 4-carboxyl group
  SITE 14: note = C-term amino
XDXXDXXAFKXFXE

SEQ ID NO: 1185 - protein, 14 aa, synthetic construct
  SITE 1: note = N-term propionic acid
  SITE 1: note = (R)-2-allylpyrrolidine-2-carboxylic acid, useful for stapling/stapled with another amino acid residue comprising an olefin group to form a staple through the olefin group
  SITE 3: note = (S)-2-amino-3-cyclohexylpropanoic acid
  VARIANT 4: note = 2-amino-2-(pent-4-en-1-yl)hept-6-enoic acid, useful for stapling/stapled with another amino acid residue comprising an olefin group to form a staple through one of the two olefin groups and/or with another amino acid residue comprising an olefin group to form a staple through the other of the two olefin groups
  SITE 6: note = (S)-3-(2-amino-2-carboxyethyl)benzoic acid
  SITE 7: note = 2-amino-2-methylpropanoic acid
  SITE 10: note = L-lysine, useful for stapling/stapled with another amino acid residue comprising a side chain acid group to form a staple through the 6-amino group
  SITE 11: note (S)-3-amino-1-((pent-4-en-1-yloxy)carbonyl)pyrrolidine-3-ca rboxylic acid, useful for stapling/stapled with another amino acid residue comprising an olefin group to form a staple through the olefin group
  SITE 12: note = (S)-2-amino-3-(thiophen-3-yl)propanoic acid
  SITE 13: note = (S)-2-amino-3-(3,4-dichlorophenyl)propanoic acid
  SITE 14: note = L-glutamic acid, useful for stapling/stapled with another amino acid residue comprising a side chain amino group to form a staple through the 4-carboxyl group
  SITE 14: note = C-term amino
XDXXDXXAFKXXXE

SEQ ID NO: 1186 - protein, 14 aa, synthetic construct
  SITE 1: note = N-term butyric acid
  SITE 1: note = (R)-2-allylpyrrolidine-2-carboxylic acid, useful for stapling/stapled with another amino acid residue comprising an olefin group to form a staple through the olefin group
  SITE 3: note = (S)-2-amino-3-cyclohexylpropanoic acid
  VARIANT 4: note = 2-amino-2-(pent-4-en-1-yl)hept-6-enoic acid, useful for stapling/stapled with another amino acid residue comprising an olefin group to form a staple through one of the two olefin groups and/or with another amino acid residue comprising an olefin group to form a staple through the other of the two olefin groups
  SITE 6: note = (S)-3-(2-amino-2-carboxyethyl)benzoic acid
  SITE 7: note = 2-amino-2-methylpropanoic acid
  SITE 10: note = L-lysine, useful for stapling/stapled with another amino acid residue comprising a side chain acid group to form a staple through the 6-amino group
  SITE 11: note (S)-3-amino-1-((pent-4-en-1-yloxy)carbonyl)pyrrolidine-3-ca rboxylic acid, useful for stapling/stapled with another amino acid residue comprising an olefin group to form a staple through the olefin group
  SITE 12: note = (S)-2-amino-3-(thiophen-3-yl)propanoic acid
  SITE 13: note = (S)-2-amino-3-(3,4-dichlorophenyl)propanoic acid
  SITE 14: note = L-glutamic acid, useful for stapling/stapled with another amino acid residue comprising a side chain amino group to form a staple through the 4-carboxyl group
  SITE 14: note = C-term amino
XDXXDXXAFKXXXE

SEQ ID NO: 1187 - protein, 14 aa, synthetic construct
  SITE 1: note = N-term isobutyric acid
  SITE 1: note = (R)-2-allylpyrrolidine-2-carboxylic acid, useful for stapling/stapled with another amino acid residue comprising an olefin group to form a staple through the olefin group
  SITE 3: note = (S)-2-amino-3-cyclohexylpropanoic acid
  VARIANT 4: note = 2-amino-2-(pent-4-en-1-yl)hept-6-enoic acid, useful for stapling/stapled with another amino acid residue comprising an olefin group to form a staple through one of the two olefin groups and/or with another amino acid residue comprising an olefin group to form a staple through the other of the two olefin groups
  SITE 6: note = (S)-3-(2-amino-2-carboxyethyl)benzoic acid
  SITE 7: note = 2-amino-2-methylpropanoic acid
  SITE 10: note = L-lysine, useful for stapling/stapled with another amino acid residue comprising a side chain acid group to form a staple through the 6-amino group
  SITE 11: note (S)-3-amino-1-((pent-4-en-1-yloxy)carbonyl)pyrrolidine-3-ca rboxylic acid, useful for stapling/stapled with another amino acid residue comprising an olefin group to form a staple through the olefin group
  SITE 12: note = (S)-2-amino-3-(thiophen-3-yl)propanoic acid
  SITE 13: note = (S)-2-amino-3-(3,4-dichlorophenyl)propanoic acid
  SITE 14: note = L-glutamic acid, useful for stapling/stapled with another amino acid residue comprising a side chain amino group to form a staple through the 4-carboxyl group
  SITE 14: note = C-term amino
XDXXDXXAFKXXXE

SEQ ID NO: 1188 - protein, 14 aa, synthetic construct
  SITE 1: note = N-term cyclopropanecarboxylic acid
  SITE 1: note = (R)-2-allylpyrrolidine-2-carboxylic acid, useful for stapling/stapled with another amino acid residue comprising an olefin group to form a staple through the olefin group
  SITE 3: note = (S)-2-amino-3-cyclohexylpropanoic acid
  VARIANT 4: note = 2-amino-2-(pent-4-en-1-yl)hept-6-enoic acid, useful for stapling/stapled with another amino acid residue comprising an olefin group to form a staple through one of the two olefin groups and/or with another amino acid residue comprising an olefin group to form a staple through the other of the two olefin groups
  SITE 6: note = (S)-3-(2-amino-2-carboxyethyl)benzoic acid
  SITE 7: note = 2-amino-2-methylpropanoic acid
  SITE 10: note = L-lysine, useful for stapling/stapled with another amino acid residue comprising a side chain acid group to form a staple through the 6-amino group
  SITE 11: note (S)-3-amino-1-((pent-4-en-1-yloxy)carbonyl)pyrrolidine-3-ca rboxylic acid, useful for stapling/stapled with another amino acid residue comprising an olefin group to form a staple through the olefin group
  SITE 12: note = (S)-2-amino-3-(thiophen-3-yl)propanoic acid
  SITE 13: note = (S)-2-amino-3-(3,4-dichlorophenyl)propanoic acid
  SITE 14: note = L-glutamic acid, useful for stapling/stapled with another amino acid residue comprising a side chain amino group to form a staple through the 4-carboxyl group
  SITE 14: note = C-term amino
XDXXDXXAFKXXXE

SEQ ID NO: 1189 - protein, 14 aa, synthetic construct
  SITE 1: note = N-term cyclobutanecarboxylic acid
  SITE 1: note = (R)-2-allylpyrrolidine-2-carboxylic acid, useful for stapling/stapled with another amino acid residue comprising an olefin group to form a staple through the olefin group
  SITE 3: note = (S)-2-amino-3-cyclohexylpropanoic acid
  VARIANT 4: note = 2-amino-2-(pent-4-en-1-yl)hept-6-enoic acid, useful for stapling/stapled with another amino acid residue comprising an olefin group to form a staple through one of the two olefin groups and/or with another amino acid residue comprising an olefin group to form a staple through the other of the two olefin groups
  SITE 6: note = (S)-3-(2-amino-2-carboxyethyl)benzoic acid
  SITE 7: note = 2-amino-2-methylpropanoic acid
  SITE 10: note = L-lysine, useful for stapling/stapled with another amino acid residue comprising a side chain acid group to form a staple through the 6-amino group
  SITE 11: note (S)-3-amino-1-((pent-4-en-1-yloxy)carbonyl)pyrrolidine-3-ca rboxylic acid, useful for stapling/stapled with another amino acid residue comprising an olefin group to form a staple through the olefin group
  SITE 12: note = (S)-2-amino-3-(thiophen-3-yl)propanoic acid
  SITE 13: note = (S)-2-amino-3-(3,4-dichlorophenyl)propanoic acid
  SITE 14: note = L-glutamic acid, useful for stapling/stapled with another amino acid residue comprising a side chain amino group to form a staple through the 4-carboxyl group
  SITE 14: note = C-term amino
XDXXDXXAFKXXXE

SEQ ID NO: 1190 - protein, 14 aa, synthetic construct
  SITE 1: note = N-term cyclopentanecarboxylic acid
  SITE 1: note = (R)-2-allylpyrrolidine-2-carboxylic acid, useful for stapling/stapled with another amino acid residue comprising an olefin group to form a staple through the olefin group
  SITE 3: note = (S)-2-amino-3-cyclohexylpropanoic acid
  VARIANT 4: note = 2-amino-2-(pent-4-en-1-yl)hept-6-enoic acid, useful for stapling/stapled with another amino acid residue comprising an olefin group to form a staple through one of the two olefin groups and/or with another amino acid residue comprising an olefin group to form a staple through the other of the two olefin groups
  SITE 6: note = (S)-3-(2-amino-2-carboxyethyl)benzoic acid
  SITE 7: note = 2-amino-2-methylpropanoic acid
  SITE 10: note = L-lysine, useful for stapling/stapled with another amino acid residue comprising a side chain acid group to form a staple through the 6-amino group
  SITE 11: note (S)-3-amino-1-((pent-4-en-1-yloxy)carbonyl)pyrrolidine-3-ca rboxylic acid, useful for stapling/stapled with another amino acid residue comprising an olefin group to form a staple through the olefin group
  SITE 12: note = (S)-2-amino-3-(thiophen-3-yl)propanoic acid
  SITE 13: note = (S)-2-amino-3-(3,4-dichlorophenyl)propanoic acid
  SITE 14: note = L-glutamic acid, useful for stapling/stapled with another amino acid residue comprising a side chain amino group to form a staple through the 4-carboxyl group
  SITE 14: note = C-term amino
XDXXDXXAFKXXXE

SEQ ID NO: 1191 - protein, 14 aa, synthetic construct
  SITE 1: note = N-term tetrahydro-2H-pyran-4-carboxylic acid
  SITE 1: note = (R)-2-allylpyrrolidine-2-carboxylic acid, useful for stapling/stapled with another amino acid residue comprising an olefin group to form a staple through the olefin group
  SITE 3: note = (S)-2-amino-3-cyclohexylpropanoic acid
  VARIANT 4: note = 2-amino-2-(pent-4-en-1-yl)hept-6-enoic acid, useful for stapling/stapled with another amino acid residue comprising an olefin group to form a staple through one of the two olefin groups and/or with another amino acid residue comprising an olefin group to form a staple through the other of the two olefin groups
  SITE 6: note = (S)-3-(2-amino-2-carboxyethyl)benzoic acid
  SITE 7: note = 2-amino-2-methylpropanoic acid
  SITE 10: note = L-lysine, useful for stapling/stapled with another amino acid residue comprising a side chain acid group to form a staple through the 6-amino group
  SITE 11: note (S)-3-amino-1-((pent-4-en-1-yloxy)carbonyl)pyrrolidine-3-ca rboxylic acid, useful for stapling/stapled with another amino acid residue comprising an olefin group to form a staple through the olefin group
  SITE 12: note = (S)-2-amino-3-(thiophen-3-yl)propanoic acid
  SITE 13: note = (S)-2-amino-3-(3,4-dichlorophenyl)propanoic acid
  SITE 14: note = L-glutamic acid, useful for stapling/stapled with another amino acid residue comprising a side chain amino group to form a staple through the 4-carboxyl group
  SITE 14: note = C-term amino
XDXXDXXAFKXXXE

SEQ ID NO: 1192 - protein, 14 aa, synthetic construct
  SITE 1: note = N-term propionic acid
  SITE 1: note = (R)-2-allylpyrrolidine-2-carboxylic acid, useful for stapling/stapled with another amino acid residue comprising an olefin group to form a staple through the olefin group
  VARIANT 4: note = 2-amino-2-(pent-4-en-1-yl)hept-6-enoic acid, useful for stapling/stapled with another amino acid residue comprising an olefin group to form a staple through one of the two olefin groups and/or with another amino acid residue comprising an olefin group to form a staple through the other of the two olefin groups
  SITE 6: note = (S)-3-(2-amino-2-carboxyethyl)benzoic acid
  SITE 7: note = 2-amino-2-methylpropanoic acid
  SITE 10: note = L-lysine, useful for stapling/stapled with another amino acid residue comprising a side chain acid group to form a staple through the 6-amino group
  SITE 11: note (S)-3-amino-1-((pent-4-en-1-yloxy)carbonyl)pyrrolidine-3-ca rboxylic acid, useful for stapling/stapled with another amino acid residue comprising an olefin group to form a staple through the olefin group
  SITE 12: note = (S)-2-amino-3-(thiophen-3-yl)propanoic acid
  SITE 13: note = (S)-2-amino-3-(3,4-dichlorophenyl)propanoic acid
  SITE 14: note = L-glutamic acid, useful for stapling/stapled with another amino acid residue comprising a side chain amino group to form a staple through the 4-carboxyl group
  SITE 14: note = C-term amino
XDIXDXXAFKXXXE

SEQ ID NO: 1193 - protein, 14 aa, synthetic construct
  SITE 1: note = N-term butyric acid
  SITE 1: note = (R)-2-allylpyrrolidine-2-carboxylic acid, useful for stapling/stapled with another amino acid residue comprising an olefin group to form a staple through the olefin group
  VARIANT 4: note = 2-amino-2-(pent-4-en-1-yl)hept-6-enoic acid, useful for stapling/stapled with another amino acid residue comprising an olefin group to form a staple through one of the two olefin groups and/or with another amino acid residue comprising an olefin group to form a staple through the other of the two olefin groups
  SITE 6: note = (S)-3-(2-amino-2-carboxyethyl)benzoic acid
  SITE 7: note = 2-amino-2-methylpropanoic acid
  SITE 10: note = L-lysine, useful for stapling/stapled with another amino acid residue comprising a side chain acid group to form a staple through the 6-amino group
  SITE 11: note (S)-3-amino-1-((pent-4-en-1-yloxy)carbonyl)pyrrolidine-3-ca rboxylic acid, useful for stapling/stapled with another amino acid residue comprising an olefin group to form a staple through the olefin group
  SITE 12: note = (S)-2-amino-3-(thiophen-3-yl)propanoic acid
  SITE 13: note = (S)-2-amino-3-(3,4-dichlorophenyl)propanoic acid
  SITE 14: note = L-glutamic acid, useful for stapling/stapled with another amino acid residue comprising a side chain amino group to form a staple through the 4-carboxyl group
  SITE 14: note = C-term amino
XDIXDXXAFKXXXE

SEQ ID NO: 1194 - protein, 14 aa, synthetic construct
  SITE 1: note = N-term cyclopropanecarboxylic acid
  SITE 1: note = (R)-2-allylpyrrolidine-2-carboxylic acid, useful for stapling/stapled with another amino acid residue comprising an olefin group to form a staple through the olefin group
  VARIANT 4: note = 2-amino-2-(pent-4-en-1-yl)hept-6-enoic acid, useful for stapling/stapled with another amino acid residue comprising an olefin group to form a staple through one of the two olefin groups and/or with another amino acid residue comprising an olefin group to form a staple through the other of the two olefin groups
  SITE 6: note = (S)-3-(2-amino-2-carboxyethyl)benzoic acid
  SITE 7: note = 2-amino-2-methylpropanoic acid
  SITE 10: note = L-lysine, useful for stapling/stapled with another amino acid residue comprising a side chain acid group to form a staple through the 6-amino group
  SITE 11: note (S)-3-amino-1-((pent-4-en-1-yloxy)carbonyl)pyrrolidine-3-ca rboxylic acid, useful for stapling/stapled with another amino acid residue comprising an olefin group to form a staple through the olefin group
  SITE 12: note = (S)-2-amino-3-(thiophen-3-yl)propanoic acid
  SITE 13: note = (S)-2-amino-3-(3,4-dichlorophenyl)propanoic acid
  SITE 14: note = L-glutamic acid, useful for stapling/stapled with another amino acid residue comprising a side chain amino group to form a staple through the 4-carboxyl group
  SITE 14: note = C-term amino
XDIXDXXAFKXXXE

SEQ ID NO: 1195 - protein, 14 aa, synthetic construct
  SITE 1: note = N-term cyclobutanecarboxylic acid
  SITE 1: note = (R)-2-allylpyrrolidine-2-carboxylic acid, useful for stapling/stapled with another amino acid residue comprising an olefin group to form a staple through the olefin group
  VARIANT 4: note = 2-amino-2-(pent-4-en-1-yl)hept-6-enoic acid, useful for stapling/stapled with another amino acid residue comprising an olefin group to form a staple through one of the two olefin groups and/or with another amino acid residue comprising an olefin group to form a staple through the other of the two olefin groups
  SITE 6: note = (S)-3-(2-amino-2-carboxyethyl)benzoic acid
  SITE 7: note = 2-amino-2-methylpropanoic acid
  SITE 10: note = L-lysine, useful for stapling/stapled with another amino acid residue comprising a side chain acid group to form a staple through the 6-amino group
  SITE 11: note (S)-3-amino-1-((pent-4-en-1-yloxy)carbonyl)pyrrolidine-3-ca rboxylic acid, useful for stapling/stapled with another amino acid residue comprising an olefin group to form a staple through the olefin group
  SITE 12: note = (S)-2-amino-3-(thiophen-3-yl)propanoic acid
  SITE 13: note = (S)-2-amino-3-(3,4-dichlorophenyl)propanoic acid
  SITE 14: note = L-glutamic acid, useful for stapling/stapled with another amino acid residue comprising a side chain amino group to form a staple through the 4-carboxyl group
  SITE 14: note = C-term amino
XDIXDXXAFKXXXE

SEQ ID NO: 1196 - protein, 14 aa, synthetic construct
  SITE 1: note = N-term cyclopentanecarboxylic acid
  SITE 1: note = (R)-2-allylpyrrolidine-2-carboxylic acid, useful for stapling/stapled with another amino acid residue comprising an olefin group to form a staple through the olefin group
  VARIANT 4: note = 2-amino-2-(pent-4-en-1-yl)hept-6-enoic acid, useful for stapling/stapled with another amino acid residue comprising an olefin group to form a staple through one of the two olefin groups and/or with another amino acid residue comprising an olefin group to form a staple through the other of the two olefin groups
  SITE 6: note = (S)-3-(2-amino-2-carboxyethyl)benzoic acid
  SITE 7: note = 2-amino-2-methylpropanoic acid
  SITE 10: note = L-lysine, useful for stapling/stapled with another amino acid residue comprising a side chain acid group to form a staple through the 6-amino group
  SITE 11: note (S)-3-amino-1-((pent-4-en-1-yloxy)carbonyl)pyrrolidine-3-ca rboxylic acid, useful for stapling/stapled with another amino acid residue comprising an olefin group to form a staple through the olefin group
  SITE 12: note = (S)-2-amino-3-(thiophen-3-yl)propanoic acid
  SITE 13: note = (S)-2-amino-3-(3,4-dichlorophenyl)propanoic acid
  SITE 14: note = L-glutamic acid, useful for stapling/stapled with another amino acid residue comprising a side chain amino group to form a staple through the 4-carboxyl group
  SITE 14: note = C-term amino
XDIXDXXAFKXXXE

SEQ ID NO: 1197 - protein, 14 aa, synthetic construct
  SITE 1: note = N-term tetrahydro-2H-pyran-4-carboxylic acid
  SITE 1: note = (R)-2-allylpyrrolidine-2-carboxylic acid, useful for stapling/stapled with another amino acid residue comprising an olefin group to form a staple through the olefin group
  VARIANT 4: note = 2-amino-2-(pent-4-en-1-yl)hept-6-enoic acid, useful for stapling/stapled with another amino acid residue comprising an olefin group to form a staple through one of the two olefin groups and/or with another amino acid residue comprising an olefin group to form a staple through the other of the two olefin groups
  SITE 6: note = (S)-3-(2-amino-2-carboxyethyl)benzoic acid
  SITE 7: note = 2-amino-2-methylpropanoic acid
  SITE 10: note = L-lysine, useful for stapling/stapled with another amino acid residue comprising a side chain acid group to form a staple through the 6-amino group
  SITE 11: note (S)-3-amino-1-((pent-4-en-1-yloxy)carbonyl)pyrrolidine-3-ca rboxylic acid, useful for stapling/stapled with another amino acid residue comprising an olefin group to form a staple through the olefin group
  SITE 12: note = (S)-2-amino-3-(thiophen-3-yl)propanoic acid
  SITE 13: note = (S)-2-amino-3-(3,4-dichlorophenyl)propanoic acid
  SITE 14: note = L-glutamic acid, useful for stapling/stapled with another amino acid residue comprising a side chain amino group to form a staple through the 4-carboxyl group
  SITE 14: note = C-term amino
XDIXDXXAFKXXXE

SEQ ID NO: 1198 - protein, 14 aa, synthetic construct
  SITE 1: note = N-term Acetic Acid
  SITE 1: note = (R)-2-allylpyrrolidine-2-carboxylic acid, useful for stapling/stapled with another amino acid residue comprising an olefin group to form a staple through the olefin group
  VARIANT 4: note = 2-amino-2-(pent-4-en-1-yl)hept-6-enoic acid, useful for stapling/stapled with another amino acid residue comprising an olefin group to form a staple through one of the two olefin groups and/or with another amino acid residue comprising an olefin group to form a staple through the other of the two olefin groups
  SITE 6: note = (S)-3-(2-amino-2-carboxyethyl)benzoic acid
  SITE 7: note = 2-amino-2-methylpropanoic acid
  SITE 10: note = L-lysine, useful for stapling/stapled with another amino acid residue comprising a side chain acid group to form a staple through the 6-amino group
  SITE 11: note (S)-3-amino-1-((pent-4-en-1-yloxy)carbonyl)pyrrolidine-3-ca rboxylic acid, useful for stapling/stapled with another amino acid residue comprising an olefin group to form a staple through the olefin group
  SITE 14: note = L-glutamic acid, useful for stapling/stapled with another amino acid residue comprising a side chain amino group to form a staple through the 4-carboxyl group
  SITE 14: note = C-term amino
XDIXDXXAFKXFFE

SEQ ID NO: 1199 - protein, 14 aa, synthetic construct
  SITE 1: note = N-term Acetic Acid
  SITE 1: note = (R)-2-allylpyrrolidine-2-carboxylic acid, useful for stapling/stapled with another amino acid residue comprising an olefin group to form a staple through the olefin group
  VARIANT 4: note = 2-amino-2-(pent-4-en-1-yl)hept-6-enoic acid, useful for stapling/stapled with another amino acid residue comprising an olefin group to form a staple through one of the two olefin groups and/or with another amino acid residue comprising an olefin group to form a staple through the other of the two olefin groups
  SITE 6: note = (S)-3-(2-amino-2-carboxyethyl)benzoic acid
  SITE 7: note = 2-amino-2-methylpropanoic acid
  SITE 10: note = L-lysine, useful for stapling/stapled with another amino acid residue comprising a side chain acid group to form a staple through the 6-amino group
  SITE 11: note (S)-3-amino-1-((pent-4-en-1-yloxy)carbonyl)pyrrolidine-3-ca rboxylic acid, useful for stapling/stapled with another amino acid residue comprising an olefin group to form a staple through the olefin group
  SITE 13: note = (S)-2-amino-3-(2-chlorophenyl)propanoic acid
  SITE 14: note = L-glutamic acid, useful for stapling/stapled with another amino acid residue comprising a side chain amino group to form a staple through the 4-carboxyl group
  SITE 14: note = C-term amino
XDIXDXXAFKXFXE

SEQ ID NO: 1200 - protein, 14 aa, synthetic construct
  SITE 1: note = N-term Acetic Acid
  SITE 1: note = (R)-2-allylpyrrolidine-2-carboxylic acid, useful for stapling/stapled with another amino acid residue comprising an olefin group to form a staple through the olefin group
  VARIANT 4: note = 2-amino-2-(pent-4-en-1-yl)hept-6-enoic acid, useful for stapling/stapled with another amino acid residue comprising an olefin group to form a staple through one of the two olefin groups and/or with another amino acid residue comprising an olefin group to form a staple through the other of the two olefin groups
  SITE 6: note = (S)-3-(2-amino-2-carboxyethyl)benzoic acid
  SITE 7: note = 2-amino-2-methylpropanoic acid
  SITE 10: note = L-lysine, useful for stapling/stapled with another amino acid residue comprising a side chain acid group to form a staple through the 6-amino group
  SITE 11: note (S)-3-amino-1-((pent-4-en-1-yloxy)carbonyl)pyrrolidine-3-ca rboxylic acid, useful for stapling/stapled with another amino acid residue comprising an olefin group to form a staple through the olefin group
  SITE 13: note = (S)-2-amino-3-(3-chlorophenyl)propanoic acid
  SITE 14: note = L-glutamic acid, useful for stapling/stapled with another amino acid residue comprising a side chain amino group to form a staple through the 4-carboxyl group
  SITE 14: note = C-term amino
XDIXDXXAFKXFXE

SEQ ID NO: 1201 - protein, 14 aa, synthetic construct
  SITE 1: note = N-term Acetic Acid
  SITE 1: note = (R)-2-allylpyrrolidine-2-carboxylic acid, useful for stapling/stapled with another amino acid residue comprising an olefin group to form a staple through the olefin group
  VARIANT 4: note = 2-amino-2-(pent-4-en-1-yl)hept-6-enoic acid, useful for stapling/stapled with another amino acid residue comprising an olefin group to form a staple through one of the two olefin groups and/or with another amino acid residue comprising an olefin group to form a staple through the other of the two olefin groups
  SITE 6: note = (S)-3-(2-amino-2-carboxyethyl)benzoic acid
  SITE 7: note = 2-amino-2-methylpropanoic acid
  SITE 10: note = L-lysine, useful for stapling/stapled with another amino acid residue comprising a side chain acid group to form a staple through the 6-amino group
  SITE 11: note (S)-3-amino-1-((pent-4-en-1-yloxy)carbonyl)pyrrolidine-3-ca rboxylic acid, useful for stapling/stapled with another amino acid residue comprising an olefin group to form a staple through the olefin group
  SITE 13: note = (S)-2-amino-3-(4-chlorophenyl)propanoic acid
  SITE 14: note = L-glutamic acid, useful for stapling/stapled with another amino acid residue comprising a side chain amino group to form a staple through the 4-carboxyl group
  SITE 14: note = C-term amino
XDIXDXXAFKXFXE

SEQ ID NO: 1202 - protein, 14 aa, synthetic construct
  SITE 1: note = N-term Acetic Acid
  SITE 1: note = (R)-2-allylpyrrolidine-2-carboxylic acid, useful for stapling/stapled with another amino acid residue comprising an olefin group to form a staple through the olefin group
  VARIANT 4: note = 2-amino-2-(pent-4-en-1-yl)hept-6-enoic acid, useful for stapling/stapled with another amino acid residue comprising an olefin group to form a staple through one of the two olefin groups and/or with another amino acid residue comprising an olefin group to form a staple through the other of the two olefin groups
  SITE 6: note = (S)-3-(2-amino-2-carboxyethyl)benzoic acid
  SITE 7: note = 2-amino-2-methylpropanoic acid
  SITE 10: note = L-lysine, useful for stapling/stapled with another amino acid residue comprising a side chain acid group to form a staple through the 6-amino group
  SITE 11: note (S)-3-amino-1-((pent-4-en-1-yloxy)carbonyl)pyrrolidine-3-ca rboxylic acid, useful for stapling/stapled with another amino acid residue comprising an olefin group to form a staple through the olefin group
  SITE 13: note = (S)-2-amino-3-(m-tolyl)propanoic acid
  SITE 14: note = L-glutamic acid, useful for stapling/stapled with another amino acid residue comprising a side chain amino group to form a staple through the 4-carboxyl group
  SITE 14: note = C-term amino
XDIXDXXAFKXFXE

SEQ ID NO: 1203 - protein, 14 aa, synthetic construct
  SITE 1: note = N-term Acetic Acid
  SITE 1: note = (R)-2-allylpyrrolidine-2-carboxylic acid, useful for stapling/stapled with another amino acid residue comprising an olefin group to form a staple through the olefin group
  VARIANT 4: note = 2-amino-2-(pent-4-en-1-yl)hept-6-enoic acid, useful for stapling/stapled with another amino acid residue comprising an olefin group to form a staple through one of the two olefin groups and/or with another amino acid residue comprising an olefin group to form a staple through the other of the two olefin groups
  SITE 6: note = (S)-3-(2-amino-2-carboxyethyl)benzoic acid
  SITE 7: note = 2-amino-2-methylpropanoic acid
  SITE 10: note = L-lysine, useful for stapling/stapled with another amino acid residue comprising a side chain acid group to form a staple through the 6-amino group
  SITE 11: note (S)-3-amino-1-((pent-4-en-1-yloxy)carbonyl)pyrrolidine-3-ca rboxylic acid, useful for stapling/stapled with another amino acid residue comprising an olefin group to form a staple through the olefin group
  SITE 13: note = (S)-2-amino-3-(2-bromophenyl)propanoic acid
  SITE 14: note = L-glutamic acid, useful for stapling/stapled with another amino acid residue comprising a side chain amino group to form a staple through the 4-carboxyl group
  SITE 14: note = C-term amino
XDIXDXXAFKXFXE

SEQ ID NO: 1204 - protein, 14 aa, synthetic construct
  SITE 1: note = N-term Acetic Acid
  SITE 1: note = (R)-2-allylpyrrolidine-2-carboxylic acid, useful for stapling/stapled with another amino acid residue comprising an olefin group to form a staple through the olefin group
  VARIANT 4: note = 2-amino-2-(pent-4-en-1-yl)hept-6-enoic acid, useful for stapling/stapled with another amino acid residue comprising an olefin group to form a staple through one of the two olefin groups and/or with another amino acid residue comprising an olefin group to form a staple through the other of the two olefin groups
  SITE 6: note = (S)-3-(2-amino-2-carboxyethyl)benzoic acid
  SITE 7: note = 2-amino-2-methylpropanoic acid
  SITE 10: note = L-lysine, useful for stapling/stapled with another amino acid residue comprising a side chain acid group to form a staple through the 6-amino group
  SITE 11: note (S)-3-amino-1-((pent-4-en-1-yloxy)carbonyl)pyrrolidine-3-ca rboxylic acid, useful for stapling/stapled with another amino acid residue comprising an olefin group to form a staple through the olefin group
  SITE 13: note = (S)-2-amino-3-(3-bromophenyl)propanoic acid
  SITE 14: note = L-glutamic acid, useful for stapling/stapled with another amino acid residue comprising a side chain amino group to form a staple through the 4-carboxyl group
  SITE 14: note = C-term amino
XDIXDXXAFKXFXE

SEQ ID NO: 1205 - protein, 14 aa, synthetic construct
  SITE 1: note = N-term Acetic Acid
  SITE 1: note = (R)-2-allylpyrrolidine-2-carboxylic acid, useful for stapling/stapled with another amino acid residue comprising an olefin group to form a staple through the olefin group
  VARIANT 4: note = 2-amino-2-(pent-4-en-1-yl)hept-6-enoic acid, useful for stapling/stapled with another amino acid residue comprising an olefin group to form a staple through one of the two olefin groups and/or with another amino acid residue comprising an olefin group to form a staple through the other of the two olefin groups
  SITE 6: note = (S)-3-(2-amino-2-carboxyethyl)benzoic acid
  SITE 7: note = 2-amino-2-methylpropanoic acid
  SITE 10: note = L-lysine, useful for stapling/stapled with another amino acid residue comprising a side chain acid group to form a staple through the 6-amino group
  SITE 11: note (S)-3-amino-1-((pent-4-en-1-yloxy)carbonyl)pyrrolidine-3-ca rboxylic acid, useful for stapling/stapled with another amino acid residue comprising an olefin group to form a staple through the olefin group
  SITE 13: note = (S)-2-amino-3-(4-bromophenyl)propanoic acid
  SITE 14: note = L-glutamic acid, useful for stapling/stapled with another amino acid residue comprising a side chain amino group to form a staple through the 4-carboxyl group
  SITE 14: note = C-term amino
XDIXDXXAFKXFXE

SEQ ID NO: 1206 - protein, 14 aa, synthetic construct
  SITE 1: note = N-term Acetic Acid
  SITE 1: note = (R)-2-allylpyrrolidine-2-carboxylic acid, useful for stapling/stapled with another amino acid residue comprising an olefin group to form a staple through the olefin group
  VARIANT 4: note = 2-amino-2-(pent-4-en-1-yl)hept-6-enoic acid, useful for stapling/stapled with another amino acid residue comprising an olefin group to form a staple through one of the two olefin groups and/or with another amino acid residue comprising an olefin group to form a staple through the other of the two olefin groups
  SITE 6: note = (S)-3-(2-amino-2-carboxyethyl)benzoic acid
  SITE 7: note = 2-amino-2-methylpropanoic acid
  SITE 10: note = L-lysine, useful for stapling/stapled with another amino acid residue comprising a side chain acid group to form a staple through the 6-amino group
  SITE 11: note (S)-3-amino-1-((pent-4-en-1-yloxy)carbonyl)pyrrolidine-3-ca rboxylic acid, useful for stapling/stapled with another amino acid residue comprising an olefin group to form a staple through the olefin group
  SITE 13: note = (S)-2-amino-3-(3-(trifluoromethyl)phenyl)propanoic acid
  SITE 14: note = L-glutamic acid, useful for stapling/stapled with another amino acid residue comprising a side chain amino group to form a staple through the 4-carboxyl group
  SITE 14: note = C-term amino
XDIXDXXAFKXFXE

SEQ ID NO: 1207 - protein, 14 aa, synthetic construct
  SITE 1: note = N-term Acetic Acid
  SITE 1: note = (R)-2-allylpyrrolidine-2-carboxylic acid, useful for stapling/stapled with another amino acid residue comprising an olefin group to form a staple through the olefin group
  VARIANT 4: note = 2-amino-2-(pent-4-en-1-yl)hept-6-enoic acid, useful for stapling/stapled with another amino acid residue comprising an olefin group to form a staple through one of the two olefin groups and/or with another amino acid residue comprising an olefin group to form a staple through the other of the two olefin groups
  SITE 6: note = (S)-3-(2-amino-2-carboxyethyl)benzoic acid
  SITE 7: note = 2-amino-2-methylpropanoic acid
  SITE 10: note = L-lysine, useful for stapling/stapled with another amino acid residue comprising a side chain acid group to form a staple through the 6-amino group
  SITE 11: note (S)-3-amino-1-((pent-4-en-1-yloxy)carbonyl)pyrrolidine-3-ca rboxylic acid, useful for stapling/stapled with another amino acid residue comprising an olefin group to form a staple through the olefin group
  SITE 13: note = (S)-2-amino-3-(4-(trifluoromethyl)phenyl)propanoic acid
  SITE 14: note = L-glutamic acid, useful for stapling/stapled with another amino acid residue comprising a side chain amino group to form a staple through the 4-carboxyl group
  SITE 14: note = C-term amino
XDIXDXXAFKXFXE

SEQ ID NO: 1208 - protein, 14 aa, synthetic construct
  SITE 1: note = N-term Acetic Acid
  SITE 1: note = (R)-2-allylpyrrolidine-2-carboxylic acid, useful for stapling/stapled with another amino acid residue comprising an olefin group to form a staple through the olefin group
  VARIANT 4: note = 2-amino-2-(pent-4-en-1-yl)hept-6-enoic acid, useful for stapling/stapled with another amino acid residue comprising an olefin group to form a staple through one of the two olefin groups and/or with another amino acid residue comprising an olefin group to form a staple through the other of the two olefin groups
  SITE 6: note = (S)-3-(2-amino-2-carboxyethyl)benzoic acid
  SITE 7: note = 2-amino-2-methylpropanoic acid
  SITE 10: note = L-lysine, useful for stapling/stapled with another amino acid residue comprising a side chain acid group to form a staple through the 6-amino group
  SITE 11: note (S)-3-amino-1-((pent-4-en-1-yloxy)carbonyl)pyrrolidine-3-ca rboxylic acid, useful for stapling/stapled with another amino acid residue comprising an olefin group to form a staple through the olefin group
  SITE 12: note = (S)-2-amino-3-(thiophen-3-yl)propanoic acid
  SITE 13: note = (S)-2-amino-3-(2-bromophenyl)propanoic acid
  SITE 14: note = L-glutamic acid, useful for stapling/stapled with another amino acid residue comprising a side chain amino group to form a staple through the 4-carboxyl group
  SITE 14: note = C-term amino
XDIXDXXAFKXXXE

SEQ ID NO: 1209 - protein, 14 aa, synthetic construct
  SITE 1: note = N-term Acetic Acid
  SITE 1: note = (R)-2-allylpyrrolidine-2-carboxylic acid, useful for stapling/stapled with another amino acid residue comprising an olefin group to form a staple through the olefin group
  VARIANT 4: note = 2-amino-2-(pent-4-en-1-yl)hept-6-enoic acid, useful for stapling/stapled with another amino acid residue comprising an olefin group to form a staple through one of the two olefin groups and/or with another amino acid residue comprising an olefin group to form a staple through the other of the two olefin groups
  SITE 6: note = (S)-3-(2-amino-2-carboxyethyl)benzoic acid
  SITE 7: note = 2-amino-2-methylpropanoic acid
  SITE 10: note = L-lysine, useful for stapling/stapled with another amino acid residue comprising a side chain acid group to form a staple through the 6-amino group
  SITE 11: note (S)-3-amino-1-((pent-4-en-1-yloxy)carbonyl)pyrrolidine-3-ca rboxylic acid, useful for stapling/stapled with another amino acid residue comprising an olefin group to form a staple through the olefin group
  SITE 12: note = (S)-2-amino-3-(thiophen-3-yl)propanoic acid
  SITE 13: note = (S)-2-amino-3-(3-bromophenyl)propanoic acid
  SITE 14: note = L-glutamic acid, useful for stapling/stapled with another amino acid residue comprising a side chain amino group to form a staple through the 4-carboxyl group
  SITE 14: note = C-term amino
XDIXDXXAFKXXXE

SEQ ID NO: 1210 - protein, 14 aa, synthetic construct
  SITE 1: note = N-term Acetic Acid
  SITE 1: note = (R)-2-allylpyrrolidine-2-carboxylic acid, useful for stapling/stapled with another amino acid residue comprising an olefin group to form a staple through the olefin group
  VARIANT 4: note = 2-amino-2-(pent-4-en-1-yl)hept-6-enoic acid, useful for stapling/stapled with another amino acid residue comprising an olefin group to form a staple through one of the two olefin groups and/or with another amino acid residue comprising an olefin group to form a staple through the other of the two olefin groups
  SITE 6: note = (S)-3-(2-amino-2-carboxyethyl)benzoic acid
  SITE 7: note = 2-amino-2-methylpropanoic acid
  SITE 10: note = L-lysine, useful for stapling/stapled with another amino acid residue comprising a side chain acid group to form a staple through the 6-amino group
  SITE 11: note (S)-3-amino-1-((pent-4-en-1-yloxy)carbonyl)pyrrolidine-3-ca rboxylic acid, useful for stapling/stapled with another amino acid residue comprising an olefin group to form a staple through the olefin group
  SITE 12: note = (S)-2-amino-3-(thiophen-3-yl)propanoic acid
  SITE 13: note = (S)-2-amino-3-(3-(trifluoromethyl)phenyl)propanoic acid
  SITE 14: note = L-glutamic acid, useful for stapling/stapled with another amino acid residue comprising a side chain amino group to form a staple through the 4-carboxyl group
  SITE 14: note = C-term amino
XDIXDXXAFKXXXE

SEQ ID NO: 1211 - protein, 14 aa, synthetic construct
  SITE 1: note = N-term Acetic Acid
  SITE 1: note = (R)-2-allylpyrrolidine-2-carboxylic acid, useful for stapling/stapled with another amino acid residue comprising an olefin group to form a staple through the olefin group
  VARIANT 4: note = 2-amino-2-(pent-4-en-1-yl)hept-6-enoic acid, useful for stapling/stapled with another amino acid residue comprising an olefin group to form a staple through one of the two olefin groups and/or with another amino acid residue comprising an olefin group to form a staple through the other of the two olefin groups
  SITE 6: note = (S)-3-(2-amino-2-carboxyethyl)benzoic acid
  SITE 7: note = 2-amino-2-methylpropanoic acid
  SITE 10: note = L-lysine, useful for stapling/stapled with another amino acid residue comprising a side chain acid group to form a staple through the 6-amino group
  SITE 11: note (S)-3-amino-1-((pent-4-en-1-yloxy)carbonyl)pyrrolidine-3-ca rboxylic acid, useful for stapling/stapled with another amino acid residue comprising an olefin group to form a staple through the olefin group
  SITE 12: note = (S)-2-amino-3-(thiophen-3-yl)propanoic acid
  SITE 13: note = (S)-2-amino-3-(4-(trifluoromethyl)phenyl)propanoic acid
  SITE 14: note = L-glutamic acid, useful for stapling/stapled with another amino acid residue comprising a side chain amino group to form a staple through the 4-carboxyl group
  SITE 14: note = C-term amino
XDIXDXXAFKXXXE

SEQ ID NO: 1212 - protein, 15 aa, synthetic construct
  SITE 1: note = N-term Acetic Acid
  SITE 1: note = (S)-2-amino-2-methylhept-6-enoic acid, useful for stapling/stapled with another amino acid residue comprising an olefin group to form a staple through the olefin group
  SITE 4: note = (S)-2-amino-3-cyclohexylpropanoic acid
  VARIANT 5: note = 2-amino-2-(pent-4-en-1-yl)hept-6-enoic acid, useful for stapling/stapled with another amino acid residue comprising an olefin group to form a staple through one of the two olefin groups and/or with another amino acid residue comprising an olefin group to form a staple through the other of the two olefin groups
  SITE 7: note = (S)-3-(2-amino-2-carboxyethyl)benzoic acid
  SITE 8: note = 2-amino-2-methylpropanoic acid
  SITE 11: note = L-lysine, useful for stapling/stapled with another amino acid residue comprising a side chain acid group to form a staple through the 6-amino group
  SITE 12: note (S)-3-amino-1-((pent-4-en-1-yloxy)carbonyl)pyrrolidine-3-ca rboxylic acid, useful for stapling/stapled with another amino acid residue comprising an olefin group to form a staple through the olefin group
  SITE 14: note = (S)-2-amino-3-(3,4-dichlorophenyl)propanoic acid
  SITE 15: note = L-glutamic acid, useful for stapling/stapled with another amino acid residue comprising a side chain amino group to form a staple through the 4-carboxyl group
  SITE 15: note = C-term amino
XADXXDXXAFKXFXE

SEQ ID NO: 1213 - protein, 15 aa, synthetic construct
  SITE 1: note = N-term Acetic Acid
  SITE 1: note = (S)-2-amino-2-methylhept-6-enoic acid, useful for stapling/stapled with another amino acid residue comprising an olefin group to form a staple through the olefin group
  SITE 4: note = (S)-2-amino-3-cyclohexylpropanoic acid
  VARIANT 5: note = 2-amino-2-(pent-4-en-1-yl)hept-6-enoic acid, useful for stapling/stapled with another amino acid residue comprising an olefin group to form a staple through one of the two olefin groups and/or with another amino acid residue comprising an olefin group to form a staple through the other of the two olefin groups
  SITE 7: note = (S)-3-(2-amino-2-carboxyethyl)benzoic acid
  SITE 8: note = 2-amino-2-methylpropanoic acid
  SITE 11: note = L-lysine, useful for stapling/stapled with another amino acid residue comprising a side chain acid group to form a staple through the 6-amino group
  SITE 12: note (S)-3-amino-1-((pent-4-en-1-yloxy)carbonyl)pyrrolidine-3-ca rboxylic acid, useful for stapling/stapled with another amino acid residue comprising an olefin group to form a staple through the olefin group
  SITE 14: note = (S)-2-amino-3-(3,4-dichlorophenyl)propanoic acid
  SITE 15: note = L-glutamic acid, useful for stapling/stapled with another amino acid residue comprising a side chain amino group to form a staple through the 4-carboxyl group
  SITE 15: note = C-term amino
XPDXXDXXAFKXFXE

SEQ ID NO: 1214 - protein, 15 aa, synthetic construct
  SITE 1: note = N-term Acetic Acid
  SITE 1: note = (S)-2-amino-2-methylhept-6-enoic acid, useful for stapling/stapled with another amino acid residue comprising an olefin group to form a staple through the olefin group
  SITE 4: note = (S)-2-amino-3-cyclohexylpropanoic acid
  VARIANT 5: note = 2-amino-2-(pent-4-en-1-yl)hept-6-enoic acid, useful for stapling/stapled with another amino acid residue comprising an olefin group to form a staple through one of the two olefin groups and/or with another amino acid residue comprising an olefin group to form a staple through the other of the two olefin groups
  SITE 7: note = (S)-3-(2-amino-2-carboxyethyl)benzoic acid
  SITE 8: note = 2-amino-2-methylpropanoic acid
  SITE 11: note = L-lysine, useful for stapling/stapled with another amino acid residue comprising a side chain acid group to form a staple through the 6-amino group
  SITE 12: note (S)-3-amino-1-((pent-4-en-1-yloxy)carbonyl)pyrrolidine-3-ca rboxylic acid, useful for stapling/stapled with another amino acid residue comprising an olefin group to form a staple through the olefin group
  SITE 14: note = (S)-2-amino-3-(3,4-dichlorophenyl)propanoic acid
  SITE 15: note = L-glutamic acid, useful for stapling/stapled with another amino acid residue comprising a side chain amino group to form a staple through the 4-carboxyl group
  SITE 15: note = C-term amino
XVDXXDXXAFKXFXE

SEQ ID NO: 1215 - protein, 15 aa, synthetic construct
  SITE 1: note = N-term Acetic Acid
  SITE 1: note = (S)-2-amino-2-methylhept-6-enoic acid, useful for stapling/stapled with another amino acid residue comprising an olefin group to form a staple through the olefin group
  SITE 4: note = (S)-2-amino-3-cyclohexylpropanoic acid
  VARIANT 5: note = 2-amino-2-(pent-4-en-1-yl)hept-6-enoic acid, useful for stapling/stapled with another amino acid residue comprising an olefin group to form a staple through one of the two olefin groups and/or with another amino acid residue comprising an olefin group to form a staple through the other of the two olefin groups
  SITE 7: note = (S)-3-(2-amino-2-carboxyethyl)benzoic acid
  SITE 8: note = 2-amino-2-methylpropanoic acid
  SITE 11: note = L-lysine, useful for stapling/stapled with another amino acid residue comprising a side chain acid group to form a staple through the 6-amino group
  SITE 12: note (S)-3-amino-1-((pent-4-en-1-yloxy)carbonyl)pyrrolidine-3-ca rboxylic acid, useful for stapling/stapled with another amino acid residue comprising an olefin group to form a staple through the olefin group
  SITE 14: note = (S)-2-amino-3-(3,4-dichlorophenyl)propanoic acid
  SITE 15: note = L-glutamic acid, useful for stapling/stapled with another amino acid residue comprising a side chain amino group to form a staple through the 4-carboxyl group
  SITE 15: note = C-term amino
XEDXXDXXAFKXFXE

SEQ ID NO: 1216 - protein, 15 aa, synthetic construct
  SITE 1: note = N-term Acetic Acid
  SITE 1: note = (S)-2-amino-2-methylhept-6-enoic acid, useful for stapling/stapled with another amino acid residue comprising an olefin group to form a staple through the olefin group
  SITE 4: note = (S)-2-amino-2-cyclohexylacetic acid
  VARIANT 5: note = 2-amino-2-(pent-4-en-1-yl)hept-6-enoic acid, useful for stapling/stapled with another amino acid residue comprising an olefin group to form a staple through one of the two olefin groups and/or with another amino acid residue comprising an olefin group to form a staple through the other of the two olefin groups
  SITE 7: note = (S)-3-(2-amino-2-carboxyethyl)benzoic acid
  SITE 8: note = 2-amino-2-methylpropanoic acid
  SITE 11: note = L-lysine, useful for stapling/stapled with another amino acid residue comprising a side chain acid group to form a staple through the 6-amino group
  SITE 12: note (S)-3-amino-1-((pent-4-en-1-yloxy)carbonyl)pyrrolidine-3-ca rboxylic acid, useful for stapling/stapled with another amino acid residue comprising an olefin group to form a staple through the olefin group
  SITE 14: note = (S)-2-amino-3-(3,4-dichlorophenyl)propanoic acid
  SITE 15: note = L-glutamic acid, useful for stapling/stapled with another amino acid residue comprising a side chain amino group to form a staple through the 4-carboxyl group
  SITE 15: note = C-term amino
XADXXDXXAFKXFXE

SEQ ID NO: 1217 - protein, 15 aa, synthetic construct
  SITE 1: note = N-term Acetic Acid
  SITE 1: note = (S)-2-amino-2-methylhept-6-enoic acid, useful for stapling/stapled with another amino acid residue comprising an olefin group to form a staple through the olefin group
  SITE 4: note = (S)-2-amino-2-cyclohexylacetic acid
  VARIANT 5: note = 2-amino-2-(pent-4-en-1-yl)hept-6-enoic acid, useful for stapling/stapled with another amino acid residue comprising an olefin group to form a staple through one of the two olefin groups and/or with another amino acid residue comprising an olefin group to form a staple through the other of the two olefin groups
  SITE 7: note = (S)-3-(2-amino-2-carboxyethyl)benzoic acid
  SITE 8: note = 2-amino-2-methylpropanoic acid
  SITE 11: note = L-lysine, useful for stapling/stapled with another amino acid residue comprising a side chain acid group to form a staple through the 6-amino group
  SITE 12: note (S)-3-amino-1-((pent-4-en-1-yloxy)carbonyl)pyrrolidine-3-ca rboxylic acid, useful for stapling/stapled with another amino acid residue comprising an olefin group to form a staple through the olefin group
  SITE 14: note = (S)-2-amino-3-(3,4-dichlorophenyl)propanoic acid
  SITE 15: note = L-glutamic acid, useful for stapling/stapled with another amino acid residue comprising a side chain amino group to form a staple through the 4-carboxyl group
  SITE 15: note = C-term amino
XPDXXDXXAFKXFXE

SEQ ID NO: 1218 - protein, 15 aa, synthetic construct
  SITE 1: note = N-term Acetic Acid
  SITE 1: note = (S)-2-amino-2-methylhept-6-enoic acid, useful for stapling/stapled with another amino acid residue comprising an olefin group to form a staple through the olefin group
  SITE 4: note = (S)-2-amino-2-cyclohexylacetic acid
  VARIANT 5: note = 2-amino-2-(pent-4-en-1-yl)hept-6-enoic acid, useful for stapling/stapled with another amino acid residue comprising an olefin group to form a staple through one of the two olefin groups and/or with another amino acid residue comprising an olefin group to form a staple through the other of the two olefin groups
  SITE 7: note = (S)-3-(2-amino-2-carboxyethyl)benzoic acid
  SITE 8: note = 2-amino-2-methylpropanoic acid
  SITE 11: note = L-lysine, useful for stapling/stapled with another amino acid residue comprising a side chain acid group to form a staple through the 6-amino group
  SITE 12: note (S)-3-amino-1-((pent-4-en-1-yloxy)carbonyl)pyrrolidine-3-ca rboxylic acid, useful for stapling/stapled with another amino acid residue comprising an olefin group to form a staple through the olefin group
  SITE 14: note = (S)-2-amino-3-(3,4-dichlorophenyl)propanoic acid
  SITE 15: note = L-glutamic acid, useful for stapling/stapled with another amino acid residue comprising a side chain amino group to form a staple through the 4-carboxyl group
  SITE 15: note = C-term amino
XVDXXDXXAFKXFXE

SEQ ID NO: 1219 - protein, 15 aa, synthetic construct
  SITE 1: note = N-term Acetic Acid
  SITE 1: note = (S)-2-amino-2-methylhept-6-enoic acid, useful for stapling/stapled with another amino acid residue comprising an olefin group to form a staple through the olefin group
  SITE 4: note = (S)-2-amino-2-cyclohexylacetic acid
  VARIANT 5: note = 2-amino-2-(pent-4-en-1-yl)hept-6-enoic acid, useful for stapling/stapled with another amino acid residue comprising an olefin group to form a staple through one of the two olefin groups and/or with another amino acid residue comprising an olefin group to form a staple through the other of the two olefin groups
  SITE 7: note = (S)-3-(2-amino-2-carboxyethyl)benzoic acid
  SITE 8: note = 2-amino-2-methylpropanoic acid
  SITE 11: note = L-lysine, useful for stapling/stapled with another amino acid residue comprising a side chain acid group to form a staple through the 6-amino group
  SITE 12: note (S)-3-amino-1-((pent-4-en-1-yloxy)carbonyl)pyrrolidine-3-ca rboxylic acid, useful for stapling/stapled with another amino acid residue comprising an olefin group to form a staple through the olefin group
  SITE 14: note = (S)-2-amino-3-(3,4-dichlorophenyl)propanoic acid
  SITE 15: note = L-glutamic acid, useful for stapling/stapled with another amino acid residue comprising a side chain amino group to form a staple through the 4-carboxyl group
  SITE 15: note = C-term amino
XEDXXDXXAFKXFXE

SEQ ID NO: 1220 - protein, 15 aa, synthetic construct
  SITE 1: note = N-term Acetic Acid
  SITE 1: note = (S)-2-amino-2-methyloct-7-enoic acid, useful for stapling/stapled with another amino acid residue comprising an olefin group to form a staple through the olefin group
  SITE 4: note = (S)-2-amino-3-cyclohexylpropanoic acid
  VARIANT 5: note = 2-amino-2-(pent-4-en-1-yl)hept-6-enoic acid, useful for stapling/stapled with another amino acid residue comprising an olefin group to form a staple through one of the two olefin groups and/or with another amino acid residue comprising an olefin group to form a staple through the other of the two olefin groups
  SITE 7: note = (S)-3-(2-amino-2-carboxyethyl)benzoic acid
  SITE 8: note = 2-amino-2-methylpropanoic acid
  SITE 11: note = L-lysine, useful for stapling/stapled with another amino acid residue comprising a side chain acid group to form a staple through the 6-amino group
  SITE 12: note (S)-3-amino-1-((pent-4-en-1-yloxy)carbonyl)pyrrolidine-3-ca rboxylic acid, useful for stapling/stapled with another amino acid residue comprising an olefin group to form a staple through the olefin group
  SITE 14: note = (S)-2-amino-3-(3,4-dichlorophenyl)propanoic acid
  SITE 15: note = L-glutamic acid, useful for stapling/stapled with another amino acid residue comprising a side chain amino group to form a staple through the 4-carboxyl group
  SITE 15: note = C-term amino
XADXXDXXAFKXFXE

SEQ ID NO: 1221 - protein, 15 aa, synthetic construct
  SITE 1: note = N-term Acetic Acid
  SITE 1: note = (S)-2-amino-2-methyloct-7-enoic acid, useful for stapling/stapled with another amino acid residue comprising an olefin group to form a staple through the olefin group
  SITE 4: note = (S)-2-amino-2-cyclohexylacetic acid
  VARIANT 5: note = 2-amino-2-(pent-4-en-1-yl)hept-6-enoic acid, useful for stapling/stapled with another amino acid residue comprising an olefin group to form a staple through one of the two olefin groups and/or with another amino acid residue comprising an olefin group to form a staple through the other of the two olefin groups
  SITE 7: note = (S)-3-(2-amino-2-carboxyethyl)benzoic acid
  SITE 8: note = 2-amino-2-methylpropanoic acid
  SITE 11: note = L-lysine, useful for stapling/stapled with another amino acid residue comprising a side chain acid group to form a staple through the 6-amino group
  SITE 12: note (S)-3-amino-1-((pent-4-en-1-yloxy)carbonyl)pyrrolidine-3-ca rboxylic acid, useful for stapling/stapled with another amino acid residue comprising an olefin group to form a staple through the olefin group
  SITE 14: note = (S)-2-amino-3-(3,4-dichlorophenyl)propanoic acid
  SITE 15: note = L-glutamic acid, useful for stapling/stapled with another amino acid residue comprising a side chain amino group to form a staple through the 4-carboxyl group
  SITE 15: note = C-term amino
XADXXDXXAFKXFXE

SEQ ID NO: 1222 - protein, 15 aa, synthetic construct
  SITE 1: note = N-term Acetic Acid
  SITE 1: note = (S)-2-amino-2-methylhept-6-enoic acid, useful for stapling/stapled with another amino acid residue comprising an olefin group to form a staple through the olefin group
  SITE 4: note = (S)-2-amino-3-cyclohexylpropanoic acid
  VARIANT 5: note = 2-amino-2-(pent-4-en-1-yl)hept-6-enoic acid, useful for stapling/stapled with another amino acid residue comprising an olefin group to form a staple through one of the two olefin groups and/or with another amino acid residue comprising an olefin group to form a staple through the other of the two olefin groups
  SITE 7: note = (S)-3-(2-amino-2-carboxyethyl)benzoic acid
  SITE 8: note = 2-amino-2-methylpropanoic acid
  SITE 11: note = L-lysine, useful for stapling/stapled with another amino acid residue comprising a side chain acid group to form a staple through the 6-amino group
  SITE 12: note (S)-3-amino-1-((but-3-en-1-yloxy)carbonyl)pyrrolidine-3-car boxylic acid, useful for stapling/stapled with another amino acid residue comprising an olefin group to form a staple through the olefin group
  SITE 14: note = (S)-2-amino-3-(3,4-dichlorophenyl)propanoic acid
  SITE 15: note = L-glutamic acid, useful for stapling/stapled with another amino acid residue comprising a side chain amino group to form a staple through the 4-carboxyl group
  SITE 15: note = C-term amino
XADXXDXXAFKXFXE

SEQ ID NO: 1223 - protein, 15 aa, synthetic construct
  SITE 1: note = N-term Acetic Acid
  SITE 1: note = (S)-2-amino-2-methylhept-6-enoic acid, useful for stapling/stapled with another amino acid residue comprising an olefin group to form a staple through the olefin group
  SITE 4: note = (S)-2-amino-2-cyclohexylacetic acid
  VARIANT 5: note = 2-amino-2-(pent-4-en-1-yl)hept-6-enoic acid, useful for stapling/stapled with another amino acid residue comprising an olefin group to form a staple through one of the two olefin groups and/or with another amino acid residue comprising an olefin group to form a staple through the other of the two olefin groups
  SITE 7: note = (S)-3-(2-amino-2-carboxyethyl)benzoic acid
  SITE 8: note = 2-amino-2-methylpropanoic acid
  SITE 11: note = L-lysine, useful for stapling/stapled with another amino acid residue comprising a side chain acid group to form a staple through the 6-amino group
  SITE 12: note (S)-3-amino-1-((but-3-en-1-yloxy)carbonyl)pyrrolidine-3-car boxylic acid, useful for stapling/stapled with another amino acid residue comprising an olefin group to form a staple through the olefin group
  SITE 14: note = (S)-2-amino-3-(3,4-dichlorophenyl)propanoic acid
  SITE 15: note = L-glutamic acid, useful for stapling/stapled with another amino acid residue comprising a side chain amino group to form a staple through the 4-carboxyl group
  SITE 15: note = C-term amino
XADXXDXXAFKXFXE

SEQ ID NO: 1224 - protein, 15 aa, synthetic construct
  SITE 1: note = N-term Acetic Acid
  SITE 1: note = (R)-2-allylpyrrolidine-2-carboxylic acid, useful for stapling/stapled with another amino acid residue comprising an olefin group to form a staple through the olefin group
  SITE 3: note = (S)-2-amino-4,4-dimethylpentanoic acid
  VARIANT 4: note = 2-amino-2-(pent-4-en-1-yl)hept-6-enoic acid, useful for stapling/stapled with another amino acid residue comprising an olefin group to form a staple through one of the two olefin groups and/or with another amino acid residue comprising an olefin group to form a staple through the other of the two olefin groups
  SITE 6: note = (S)-3-(2-amino-2-carboxyethyl)benzoic acid
  SITE 7: note = 2-amino-2-methylpropanoic acid
  SITE 10: note = L-lysine, useful for stapling/stapled with another amino acid residue comprising a side chain acid group to form a staple through the 6-amino group
  SITE 11: note (S)-3-amino-1-((pent-4-en-1-yloxy)carbonyl)pyrrolidine-3-ca rboxylic acid, useful for stapling/stapled with another amino acid residue comprising an olefin group to form a staple through the olefin group
  SITE 12: note = (S)-2-amino-3-(2-(trifluoromethyl)phenyl)propanoic acid
  SITE 13: note = (S)-2-amino-3-(benzo[b]thiophen-3-yl)propanoic acid
  SITE 14: note = L-glutamic acid, useful for stapling/stapled with another amino acid residue comprising a side chain amino group to form a staple through the 4-carboxyl group
  SITE 15: note = C-term amino
XDXXDXXAFKXXXEK

SEQ ID NO: 1225 - protein, 14 aa, synthetic construct
  SITE 1: note = N-term Acetic Acid
  SITE 1: note = (R)-2-allylpyrrolidine-2-carboxylic acid, useful for stapling/stapled with another amino acid residue comprising an olefin group to form a staple through the olefin group
  SITE 3: note = (S)-2-amino-3,3-diphenylpropanoic acid
  VARIANT 4: note = 2-amino-2-(pent-4-en-1-yl)hept-6-enoic acid, useful for stapling/stapled with another amino acid residue comprising an olefin group to form a staple through one of the two olefin groups and/or with another amino acid residue comprising an olefin group to form a staple through the other of the two olefin groups
  SITE 6: note = (S)-3-(2-amino-2-carboxyethyl)benzoic acid
  SITE 7: note = 1-aminocyclopentane-1-carboxylic acid
  SITE 10: note = L-lysine, useful for stapling/stapled with another amino acid residue comprising a side chain acid group to form a staple through the 6-amino group
  SITE 11: note (S)-3-amino-1-((pent-4-en-1-yloxy)carbonyl)pyrrolidine-3-ca rboxylic acid, useful for stapling/stapled with another amino acid residue comprising an olefin group to form a staple through the olefin group
  SITE 12: note = (S)-2-amino-3-(thiophen-3-yl)propanoic acid
  SITE 13: note = (S)-2-amino-3-(3,4-dichlorophenyl)propanoic acid
  SITE 14: note = L-glutamic acid, useful for stapling/stapled with another amino acid residue comprising a side chain amino group to form a staple through the 4-carboxyl group
  SITE 14: note = C-term amino
XNXXDXXAFKXXXE

SEQ ID NO: 1226 - protein, 14 aa, synthetic construct
  SITE 1: note = N-term Acetic Acid
  SITE 1: note = (R)-2-allylpyrrolidine-2-carboxylic acid, useful for stapling/stapled with another amino acid residue comprising an olefin group to form a staple through the olefin group
  SITE 2: note = L-allothreonine
  SITE 3: note = (S)-2-amino-3,3-diphenylpropanoic acid
  VARIANT 4: note = 2-amino-2-(pent-4-en-1-yl)hept-6-enoic acid, useful for stapling/stapled with another amino acid residue comprising an olefin group to form a staple through one of the two olefin groups and/or with another amino acid residue comprising an olefin group to form a staple through the other of the two olefin groups
  SITE 6: note = (S)-3-(2-amino-2-carboxyethyl)benzoic acid
  SITE 7: note = 1-aminocyclopentane-1-carboxylic acid
  SITE 10: note = L-lysine, useful for stapling/stapled with another amino acid residue comprising a side chain acid group to form a staple through the 6-amino group
  SITE 11: note (S)-3-amino-1-((pent-4-en-1-yloxy)carbonyl)pyrrolidine-3-ca rboxylic acid, useful for stapling/stapled with another amino acid residue comprising an olefin group to form a staple through the olefin group
  SITE 12: note = (S)-2-amino-3-(thiophen-3-yl)propanoic acid
  SITE 13: note = (S)-2-amino-3-(3,4-dichlorophenyl)propanoic acid
  SITE 14: note = L-glutamic acid, useful for stapling/stapled with another amino acid residue comprising a side chain amino group to form a staple through the 4-carboxyl group
  SITE 14: note = C-term amino
XTXXDXXAFKXXXE

SEQ ID NO: 1227 - protein, 14 aa, synthetic construct
  SITE 1: note = N-term Acetic Acid
  SITE 1: note = (R)-2-allylpyrrolidine-2-carboxylic acid, useful for stapling/stapled with another amino acid residue comprising an olefin group to form a staple through the olefin group
  SITE 3: note = (S)-2-amino-3,3-diphenylpropanoic acid
  VARIANT 4: note = 2-amino-2-(pent-4-en-1-yl)hept-6-enoic acid, useful for stapling/stapled with another amino acid residue comprising an olefin group to form a staple through one of the two olefin groups and/or with another amino acid residue comprising an olefin group to form a staple through the other of the two olefin groups
  SITE 6: note = (S)-3-(2-amino-2-carboxyethyl)benzoic acid
  SITE 7: note = 1-aminocyclopentane-1-carboxylic acid
  SITE 10: note = L-lysine, useful for stapling/stapled with another amino acid residue comprising a side chain acid group to form a staple through the 6-amino group
  SITE 11: note (S)-3-amino-1-((pent-4-en-1-yloxy)carbonyl)pyrrolidine-3-ca rboxylic acid, useful for stapling/stapled with another amino acid residue comprising an olefin group to form a staple through the olefin group
  SITE 12: note = (S)-2-amino-3-(thiophen-3-yl)propanoic acid
  SITE 13: note = (S)-2-amino-3-(3,4-dichlorophenyl)propanoic acid
  SITE 14: note = L-glutamic acid, useful for stapling/stapled with another amino acid residue comprising a side chain amino group to form a staple through the 4-carboxyl group
  SITE 14: note = C-term amino
XDXXNXXAFKXXXE

SEQ ID NO: 1228 - protein, 14 aa, synthetic construct
  SITE 1: note = N-term Acetic Acid
  SITE 1: note = (R)-2-allylpyrrolidine-2-carboxylic acid, useful for stapling/stapled with another amino acid residue comprising an olefin group to form a staple through the olefin group
  SITE 3: note = (S)-2-amino-3,3-diphenylpropanoic acid
  VARIANT 4: note = 2-amino-2-(pent-4-en-1-yl)hept-6-enoic acid, useful for stapling/stapled with another amino acid residue comprising an olefin group to form a staple through one of the two olefin groups and/or with another amino acid residue comprising an olefin group to form a staple through the other of the two olefin groups
  SITE 5: note = L-allothreonine
  SITE 6: note = (S)-3-(2-amino-2-carboxyethyl)benzoic acid
  SITE 7: note = 1-aminocyclopentane-1-carboxylic acid
  SITE 10: note = L-lysine, useful for stapling/stapled with another amino acid residue comprising a side chain acid group to form a staple through the 6-amino group
  SITE 11: note (S)-3-amino-1-((pent-4-en-1-yloxy)carbonyl)pyrrolidine-3-ca rboxylic acid, useful for stapling/stapled with another amino acid residue comprising an olefin group to form a staple through the olefin group
  SITE 12: note = (S)-2-amino-3-(thiophen-3-yl)propanoic acid
  SITE 13: note = (S)-2-amino-3-(3,4-dichlorophenyl)propanoic acid
  SITE 14: note = L-glutamic acid, useful for stapling/stapled with another amino acid residue comprising a side chain amino group to form a staple through the 4-carboxyl group
  SITE 14: note = C-term amino
XDXXTXXAFKXXXE

SEQ ID NO: 1229 - protein, 14 aa, synthetic construct
  SITE 1: note = N-term Acetic Acid
  SITE 1: note = (R)-2-allylpyrrolidine-2-carboxylic acid, useful for stapling/stapled with another amino acid residue comprising an olefin group to form a staple through the olefin group
  SITE 3: note = (S)-2-amino-3,3-diphenylpropanoic acid
  VARIANT 4: note = 2-amino-2-(pent-4-en-1-yl)hept-6-enoic acid, useful for stapling/stapled with another amino acid residue comprising an olefin group to form a staple through one of the two olefin groups and/or with another amino acid residue comprising an olefin group to form a staple through the other of the two olefin groups
  SITE 6: note = (S)-3-(2-amino-2-carboxyethyl)benzoic acid
  SITE 7: note = (S)-2-aminohexanoic acid
  SITE 10: note = L-lysine, useful for stapling/stapled with another amino acid residue comprising a side chain acid group to form a staple through the 6-amino group
  SITE 11: note (S)-3-amino-1-((pent-4-en-1-yloxy)carbonyl)pyrrolidine-3-ca rboxylic acid, useful for stapling/stapled with another amino acid residue comprising an olefin group to form a staple through the olefin group
  SITE 12: note = (S)-2-amino-3-(thiophen-3-yl)propanoic acid
  SITE 13: note = (S)-2-amino-3-(3,4-dichlorophenyl)propanoic acid
  SITE 14: note = L-glutamic acid, useful for stapling/stapled with another amino acid residue comprising a side chain amino group to form a staple through the 4-carboxyl group
  SITE 14: note = C-term amino
XDXXDXXAFKXXXE

SEQ ID NO: 1230 - protein, 14 aa, synthetic construct
  SITE 1: note = N-term Acetic Acid
  SITE 1: note = (R)-2-allylpyrrolidine-2-carboxylic acid, useful for stapling/stapled with another amino acid residue comprising an olefin group to form a staple through the olefin group
  SITE 3: note = (S)-2-amino-3,3-diphenylpropanoic acid
  VARIANT 4: note = 2-amino-2-(pent-4-en-1-yl)hept-6-enoic acid, useful for stapling/stapled with another amino acid residue comprising an olefin group to form a staple through one of the two olefin groups and/or with another amino acid residue comprising an olefin group to form a staple through the other of the two olefin groups
  SITE 6: note = (S)-3-(2-amino-2-carboxyethyl)benzoic acid
  SITE 10: note = L-lysine, useful for stapling/stapled with another amino acid residue comprising a side chain acid group to form a staple through the 6-amino group
  SITE 11: note (S)-3-amino-1-((pent-4-en-1-yloxy)carbonyl)pyrrolidine-3-ca rboxylic acid, useful for stapling/stapled with another amino acid residue comprising an olefin group to form a staple through the olefin group
  SITE 12: note = (S)-2-amino-3-(thiophen-3-yl)propanoic acid
  SITE 13: note = (S)-2-amino-3-(3,4-dichlorophenyl)propanoic acid
  SITE 14: note = L-glutamic acid, useful for stapling/stapled with another amino acid residue comprising a side chain amino group to form a staple through the 4-carboxyl group
  SITE 14: note = C-term amino
XDXXDXTAFKXXXE

SEQ ID NO: 1231 - protein, 14 aa, synthetic construct
  SITE 1: note = N-term Acetic Acid
  SITE 1: note = (R)-2-allylpyrrolidine-2-carboxylic acid, useful for stapling/stapled with another amino acid residue comprising an olefin group to form a staple through the olefin group
  SITE 3: note = (S)-2-amino-3,3-diphenylpropanoic acid
  VARIANT 4: note = 2-amino-2-(pent-4-en-1-yl)hept-6-enoic acid, useful for stapling/stapled with another amino acid residue comprising an olefin group to form a staple through one of the two olefin groups and/or with another amino acid residue comprising an olefin group to form a staple through the other of the two olefin groups
  SITE 6: note = (S)-3-(2-amino-2-carboxyethyl)benzoic acid
  SITE 7: note = (S)-2-aminohexanoic acid
  SITE 10: note = L-lysine, useful for stapling/stapled with another amino acid residue comprising a side chain acid group to form a staple through the 6-amino group
  SITE 11: note (S)-3-amino-1-((pent-4-en-1-yloxy)carbonyl)pyrrolidine-3-ca rboxylic acid, useful for stapling/stapled with another amino acid residue comprising an olefin group to form a staple through the olefin group
  SITE 12: note = (S)-2-amino-3-(thiophen-3-yl)propanoic acid
  SITE 13: note = (S)-2-amino-3-(3,4-dichlorophenyl)propanoic acid
  SITE 14: note = L-glutamic acid, useful for stapling/stapled with another amino acid residue comprising a side chain amino group to form a staple through the 4-carboxyl group
  SITE 14: note = C-term amino
XNXXDXXAFKXXXE

SEQ ID NO: 1232 - protein, 14 aa, synthetic construct
  SITE 1: note = N-term Acetic Acid
  SITE 1: note = (R)-2-allylpyrrolidine-2-carboxylic acid, useful for stapling/stapled with another amino acid residue comprising an olefin group to form a staple through the olefin group
  SITE 2: note = L-allothreonine
  SITE 3: note = (S)-2-amino-3,3-diphenylpropanoic acid
  VARIANT 4: note = 2-amino-2-(pent-4-en-1-yl)hept-6-enoic acid, useful for stapling/stapled with another amino acid residue comprising an olefin group to form a staple through one of the two olefin groups and/or with another amino acid residue comprising an olefin group to form a staple through the other of the two olefin groups
  SITE 6: note = (S)-3-(2-amino-2-carboxyethyl)benzoic acid
  SITE 7: note = (S)-2-aminohexanoic acid
  SITE 10: note = L-lysine, useful for stapling/stapled with another amino acid residue comprising a side chain acid group to form a staple through the 6-amino group
  SITE 11: note (S)-3-amino-1-((pent-4-en-1-yloxy)carbonyl)pyrrolidine-3-ca rboxylic acid, useful for stapling/stapled with another amino acid residue comprising an olefin group to form a staple through the olefin group
  SITE 12: note = (S)-2-amino-3-(thiophen-3-yl)propanoic acid
  SITE 13: note = (S)-2-amino-3-(3,4-dichlorophenyl)propanoic acid
  SITE 14: note = L-glutamic acid, useful for stapling/stapled with another amino acid residue comprising a side chain amino group to form a staple through the 4-carboxyl group
  SITE 14: note = C-term amino
XTXXDXXAFKXXXE

SEQ ID NO: 1233 - protein, 14 aa, synthetic construct
  SITE 1: note = N-term Acetic Acid
  SITE 1: note = (R)-2-allylpyrrolidine-2-carboxylic acid, useful for stapling/stapled with another amino acid residue comprising an olefin group to form a staple through the olefin group
  SITE 3: note = (S)-2-amino-3,3-diphenylpropanoic acid
  VARIANT 4: note = 2-amino-2-(pent-4-en-1-yl)hept-6-enoic acid, useful for stapling/stapled with another amino acid residue comprising an olefin group to form a staple through one of the two olefin groups and/or with another amino acid residue comprising an olefin group to form a staple through the other of the two olefin groups
  SITE 6: note = (S)-3-(2-amino-2-carboxyethyl)benzoic acid
  SITE 7: note = (S)-2-aminohexanoic acid
  SITE 10: note = L-lysine, useful for stapling/stapled with another amino acid residue comprising a side chain acid group to form a staple through the 6-amino group
  SITE 11: note (S)-3-amino-1-((pent-4-en-1-yloxy)carbonyl)pyrrolidine-3-ca rboxylic acid, useful for stapling/stapled with another amino acid residue comprising an olefin group to form a staple through the olefin group
  SITE 12: note = (S)-2-amino-3-(thiophen-3-yl)propanoic acid
  SITE 13: note = (S)-2-amino-3-(3,4-dichlorophenyl)propanoic acid
  SITE 14: note = L-glutamic acid, useful for stapling/stapled with another amino acid residue comprising a side chain amino group to form a staple through the 4-carboxyl group
  SITE 14: note = C-term amino
XDXXNXXAFKXXXE

SEQ ID NO: 1234 - protein, 14 aa, synthetic construct
  SITE 1: note = N-term Acetic Acid
  SITE 1: note = (R)-2-allylpyrrolidine-2-carboxylic acid, useful for stapling/stapled with another amino acid residue comprising an olefin group to form a staple through the olefin group
  SITE 3: note = (S)-2-amino-3,3-diphenylpropanoic acid
  VARIANT 4: note = 2-amino-2-(pent-4-en-1-yl)hept-6-enoic acid, useful for stapling/stapled with another amino acid residue comprising an olefin group to form a staple through one of the two olefin groups and/or with another amino acid residue comprising an olefin group to form a staple through the other of the two olefin groups
  SITE 5: note = L-allothreonine
  SITE 6: note = (S)-3-(2-amino-2-carboxyethyl)benzoic acid
  SITE 7: note = (S)-2-aminohexanoic acid
  SITE 10: note = L-lysine, useful for stapling/stapled with another amino acid residue comprising a side chain acid group to form a staple through the 6-amino group
  SITE 11: note (S)-3-amino-1-((pent-4-en-1-yloxy)carbonyl)pyrrolidine-3-ca rboxylic acid, useful for stapling/stapled with another amino acid residue comprising an olefin group to form a staple through the olefin group
  SITE 12: note = (S)-2-amino-3-(thiophen-3-yl)propanoic acid
  SITE 13: note = (S)-2-amino-3-(3,4-dichlorophenyl)propanoic acid
  SITE 14: note = L-glutamic acid, useful for stapling/stapled with another amino acid residue comprising a side chain amino group to form a staple through the 4-carboxyl group
  SITE 14: note = C-term amino
XDXXTXXAFKXXXE

SEQ ID NO: 1235 - protein, 14 aa, synthetic construct
  SITE 1: note = N-term Acetic Acid
  SITE 1: note = (R)-2-allylpyrrolidine-2-carboxylic acid, useful for stapling/stapled with another amino acid residue comprising an olefin group to form a staple through the olefin group
  SITE 3: note = (S)-2-amino-3,3-diphenylpropanoic acid
  VARIANT 4: note = 2-amino-2-(pent-4-en-1-yl)hept-6-enoic acid, useful for stapling/stapled with another amino acid residue comprising an olefin group to form a staple through one of the two olefin groups and/or with another amino acid residue comprising an olefin group to form a staple through the other of the two olefin groups
  SITE 6: note = (S)-3-(2-amino-2-carboxyethyl)benzoic acid
  SITE 7: note = 1-aminocyclopentane-1-carboxylic acid
  SITE 10: note = L-lysine, useful for stapling/stapled with another amino acid residue comprising a side chain acid group to form a staple through the 6-amino group
  SITE 11: note (S)-3-amino-1-((pent-4-en-1-yloxy)carbonyl)pyrrolidine-3-ca rboxylic acid, useful for stapling/stapled with another amino acid residue comprising an olefin group to form a staple through the olefin group
  SITE 12: note = (S)-2-amino-3-(2-(trifluoromethyl)phenyl)propanoic acid
  SITE 13: note = (S)-2-amino-3-(3,4-dichlorophenyl)propanoic acid
  SITE 14: note = L-glutamic acid, useful for stapling/stapled with another amino acid residue comprising a side chain amino group to form a staple through the 4-carboxyl group
  SITE 14: note = C-term amino
XDXXDXXAFKXXXE

SEQ ID NO: 1236 - protein, 15 aa, synthetic construct
  SITE 1: note = N-term Acetic Acid
  SITE 1: note = (R)-2-allylpyrrolidine-2-carboxylic acid, useful for stapling/stapled with another amino acid residue comprising an olefin group to form a staple through the olefin group
  SITE 3: note = (S)-2-amino-3-cyclohexylpropanoic acid
  VARIANT 4: note = 2-amino-2-(pent-4-en-1-yl)hept-6-enoic acid, useful for stapling/stapled with another amino acid residue comprising an olefin group to form a staple through one of the two olefin groups and/or with another amino acid residue comprising an olefin group to form a staple through the other of the two olefin groups
  SITE 6: note = (S)-3-(2-amino-2-carboxyethyl)benzoic acid
  SITE 7: note = 2-amino-2-methylpropanoic acid
  SITE 10: note = L-lysine, useful for stapling/stapled with another amino acid residue comprising a side chain acid group to form a staple through the 6-amino group
  SITE 11: note (S)-3-amino-1-((pent-4-en-1-yloxy)carbonyl)pyrrolidine-3-ca rboxylic acid, useful for stapling/stapled with another amino acid residue comprising an olefin group to form a staple through the olefin group
  SITE 12: note = (S)-2-amino-3-(2-chlorophenyl)propanoic acid
  SITE 13: note = (S)-2-amino-3-(benzo[b]thiophen-3-yl)propanoic acid
  SITE 14: note = L-glutamic acid, useful for stapling/stapled with another amino acid residue comprising a side chain amino group to form a staple through the 4-carboxyl group
  SITE 15: note = C-term amino
XDXXDXXAFKXXXEL

SEQ ID NO: 1237 - protein, 15 aa, synthetic construct
  SITE 1: note = N-term Acetic Acid
  SITE 1: note = (R)-2-allylpyrrolidine-2-carboxylic acid, useful for stapling/stapled with another amino acid residue comprising an olefin group to form a staple through the olefin group
  SITE 3: note = (S)-2-amino-3-cyclohexylpropanoic acid
  VARIANT 4: note = 2-amino-2-(pent-4-en-1-yl)hept-6-enoic acid, useful for stapling/stapled with another amino acid residue comprising an olefin group to form a staple through one of the two olefin groups and/or with another amino acid residue comprising an olefin group to form a staple through the other of the two olefin groups
  SITE 6: note = (S)-3-(2-amino-2-carboxyethyl)benzoic acid
  SITE 7: note = 2-amino-2-methylpropanoic acid
  SITE 10: note = L-lysine, useful for stapling/stapled with another amino acid residue comprising a side chain acid group to form a staple through the 6-amino group
  SITE 11: note (S)-3-amino-1-((pent-4-en-1-yloxy)carbonyl)pyrrolidine-3-ca rboxylic acid, useful for stapling/stapled with another amino acid residue comprising an olefin group to form a staple through the olefin group
  SITE 12: note = (S)-2-amino-3-(2-chlorophenyl)propanoic acid
  SITE 13: note = (S)-2-amino-3-(benzo[b]thiophen-3-yl)propanoic acid
  SITE 14: note = L-glutamic acid, useful for stapling/stapled with another amino acid residue comprising a side chain amino group to form a staple through the 4-carboxyl group
  SITE 15: note = C-term amino
XDXXDXXAFKXXXEA

SEQ ID NO: 1238 - protein, 15 aa, synthetic construct
  SITE 1: note = N-term Acetic Acid
  SITE 1: note = (R)-2-allylpyrrolidine-2-carboxylic acid, useful for stapling/stapled with another amino acid residue comprising an olefin group to form a staple through the olefin group
  SITE 3: note = (S)-2-amino-3-cyclohexylpropanoic acid
  VARIANT 4: note = 2-amino-2-(pent-4-en-1-yl)hept-6-enoic acid, useful for stapling/stapled with another amino acid residue comprising an olefin group to form a staple through one of the two olefin groups and/or with another amino acid residue comprising an olefin group to form a staple through the other of the two olefin groups
  SITE 6: note = (S)-3-(2-amino-2-carboxyethyl)benzoic acid
  SITE 7: note = 2-amino-2-methylpropanoic acid
  SITE 10: note = L-lysine, useful for stapling/stapled with another amino acid residue comprising a side chain acid group to form a staple through the 6-amino group
  SITE 11: note (S)-3-amino-1-((pent-4-en-1-yloxy)carbonyl)pyrrolidine-3-ca rboxylic acid, useful for stapling/stapled with another amino acid residue comprising an olefin group to form a staple through the olefin group
  SITE 13: note = (S)-2-amino-3-(benzo[b]thiophen-3-yl)propanoic acid
  SITE 14: note = L-glutamic acid, useful for stapling/stapled with another amino acid residue comprising a side chain amino group to form a staple through the 4-carboxyl group
  SITE 15: note = C-term amino
XDXXDXXAFKXFXEL

SEQ ID NO: 1239 - protein, 15 aa, synthetic construct
  SITE 1: note = N-term Acetic Acid
  SITE 1: note = (R)-2-allylpyrrolidine-2-carboxylic acid, useful for stapling/stapled with another amino acid residue comprising an olefin group to form a staple through the olefin group
  SITE 3: note = (S)-2-amino-3-cyclohexylpropanoic acid
  VARIANT 4: note = 2-amino-2-(pent-4-en-1-yl)hept-6-enoic acid, useful for stapling/stapled with another amino acid residue comprising an olefin group to form a staple through one of the two olefin groups and/or with another amino acid residue comprising an olefin group to form a staple through the other of the two olefin groups
  SITE 6: note = (S)-3-(2-amino-2-carboxyethyl)benzoic acid
  SITE 7: note = 2-amino-2-methylpropanoic acid
  SITE 10: note = L-lysine, useful for stapling/stapled with another amino acid residue comprising a side chain acid group to form a staple through the 6-amino group
  SITE 11: note (S)-3-amino-1-((pent-4-en-1-yloxy)carbonyl)pyrrolidine-3-ca rboxylic acid, useful for stapling/stapled with another amino acid residue comprising an olefin group to form a staple through the olefin group
  SITE 13: note = (S)-2-amino-3-(benzo[b]thiophen-3-yl)propanoic acid
  SITE 14: note = L-glutamic acid, useful for stapling/stapled with another amino acid residue comprising a side chain amino group to form a staple through the 4-carboxyl group
  SITE 15: note = C-term amino
XDXXDXXAFKXFXEA

SEQ ID NO: 1240 - protein, 14 aa, synthetic construct
  SITE 1: note = N-term Acetic Acid
  SITE 1: note = (R)-2-allylpyrrolidine-2-carboxylic acid, useful for stapling/stapled with another amino acid residue comprising an olefin group to form a staple through the olefin group
  SITE 3: note = (S)-2-amino-3-cyclohexylpropanoic acid
  VARIANT 4: note = 2-amino-2-(pent-4-en-1-yl)hept-6-enoic acid, useful for stapling/stapled with another amino acid residue comprising an olefin group to form a staple through one of the two olefin groups and/or with another amino acid residue comprising an olefin group to form a staple through the other of the two olefin groups
  SITE 6: note = (S)-3-(2-amino-2-carboxyethyl)benzoic acid
  SITE 7: note = 2-amino-2-methylpropanoic acid
  SITE 10: note = L-lysine, useful for stapling/stapled with another amino acid residue comprising a side chain acid group to form a staple through the 6-amino group
  SITE 11: note (S)-3-amino-1-((pent-4-en-1-yloxy)carbonyl)pyrrolidine-3-ca rboxylic acid, useful for stapling/stapled with another amino acid residue comprising an olefin group to form a staple through the olefin group
  SITE 13: note = (S)-2-amino-3-(benzo[b]thiophen-3-yl)propanoic acid
  SITE 14: note = L-glutamic acid, useful for stapling/stapled with another amino acid residue comprising a side chain amino group to form a staple through the 4-carboxyl group
  SITE 14: note = C-term amino
XDXXDXXAFKXFXE

SEQ ID NO: 1241 - protein, 15 aa, synthetic construct
  SITE 1: note = N-term Acetic Acid
  SITE 1: note = (R)-2-allylpyrrolidine-2-carboxylic acid, useful for stapling/stapled with another amino acid residue comprising an olefin group to form a staple through the olefin group
  SITE 3: note = (S)-2-amino-3-cyclohexylpropanoic acid
  VARIANT 4: note = 2-amino-2-(pent-4-en-1-yl)hept-6-enoic acid, useful for stapling/stapled with another amino acid residue comprising an olefin group to form a staple through one of the two olefin groups and/or with another amino acid residue comprising an olefin group to form a staple through the other of the two olefin groups
  SITE 6: note = (S)-3-(2-amino-2-carboxyethyl)benzoic acid
  SITE 7: note = 2-amino-2-methylpropanoic acid
  SITE 10: note = L-lysine, useful for stapling/stapled with another amino acid residue comprising a side chain acid group to form a staple through the 6-amino group
  SITE 11: note (S)-3-amino-1-((pent-4-en-1-yloxy)carbonyl)pyrrolidine-3-ca rboxylic acid, useful for stapling/stapled with another amino acid residue comprising an olefin group to form a staple through the olefin group
  SITE 12: note = (S)-2-amino-3-(2-fluorophenyl)propanoic acid
  SITE 13: note = (S)-2-amino-3-(benzo[b]thiophen-3-yl)propanoic acid
  SITE 14: note = L-glutamic acid, useful for stapling/stapled with another amino acid residue comprising a side chain amino group to form a staple through the 4-carboxyl group
  SITE 15: note = C-term amino
XDXXDXXAFKXXXEL

SEQ ID NO: 1242 - protein, 15 aa, synthetic construct
  SITE 1: note = N-term Acetic Acid
  SITE 1: note = (R)-2-allylpyrrolidine-2-carboxylic acid, useful for stapling/stapled with another amino acid residue comprising an olefin group to form a staple through the olefin group
  SITE 3: note = (S)-2-amino-3-cyclohexylpropanoic acid
  VARIANT 4: note = 2-amino-2-(pent-4-en-1-yl)hept-6-enoic acid, useful for stapling/stapled with another amino acid residue comprising an olefin group to form a staple through one of the two olefin groups and/or with another amino acid residue comprising an olefin group to form a staple through the other of the two olefin groups
  SITE 6: note = (S)-3-(2-amino-2-carboxyethyl)benzoic acid
  SITE 7: note = 2-amino-2-methylpropanoic acid
  SITE 10: note = L-lysine, useful for stapling/stapled with another amino acid residue comprising a side chain acid group to form a staple through the 6-amino group
  SITE 11: note (S)-3-amino-1-((pent-4-en-1-yloxy)carbonyl)pyrrolidine-3-ca rboxylic acid, useful for stapling/stapled with another amino acid residue comprising an olefin group to form a staple through the olefin group
  SITE 12: note = (S)-2-amino-3-(2-fluorophenyl)propanoic acid
  SITE 13: note = (S)-2-amino-3-(benzo[b]thiophen-3-yl)propanoic acid
  SITE 14: note = L-glutamic acid, useful for stapling/stapled with another amino acid residue comprising a side chain amino group to form a staple through the 4-carboxyl group
  SITE 15: note = C-term amino
XDXXDXXAFKXXXEA

SEQ ID NO: 1243 - protein, 14 aa, synthetic construct
  SITE 1: note = N-term Acetic Acid
  SITE 1: note = (R)-2-allylpyrrolidine-2-carboxylic acid, useful for stapling/stapled with another amino acid residue comprising an olefin group to form a staple through the olefin group
  SITE 3: note = (S)-2-amino-3-cyclohexylpropanoic acid
  VARIANT 4: note = 2-amino-2-(pent-4-en-1-yl)hept-6-enoic acid, useful for stapling/stapled with another amino acid residue comprising an olefin group to form a staple through one of the two olefin groups and/or with another amino acid residue comprising an olefin group to form a staple through the other of the two olefin groups
  SITE 6: note = (S)-3-(2-amino-2-carboxyethyl)benzoic acid
  SITE 7: note = 2-amino-2-methylpropanoic acid
  SITE 10: note = L-lysine, useful for stapling/stapled with another amino acid residue comprising a side chain acid group to form a staple through the 6-amino group
  SITE 11: note (S)-3-amino-1-((pent-4-en-1-yloxy)carbonyl)pyrrolidine-3-ca rboxylic acid, useful for stapling/stapled with another amino acid residue comprising an olefin group to form a staple through the olefin group
  SITE 12: note = (S)-2-amino-3-(2-fluorophenyl)propanoic acid
  SITE 13: note = (S)-2-amino-3-(benzo[b]thiophen-3-yl)propanoic acid
  SITE 14: note = L-glutamic acid, useful for stapling/stapled with another amino acid residue comprising a side chain amino group to form a staple through the 4-carboxyl group
  SITE 14: note = C-term amino
XDXXDXXAFKXXXE

SEQ ID NO: 1244 - protein, 15 aa, synthetic construct
  SITE 1: note = N-term Acetic Acid
  SITE 1: note = (R)-2-allylpyrrolidine-2-carboxylic acid, useful for stapling/stapled with another amino acid residue comprising an olefin group to form a staple through the olefin group
  SITE 3: note = (S)-2-amino-3-cyclohexylpropanoic acid
  VARIANT 4: note = 2-amino-2-(pent-4-en-1-yl)hept-6-enoic acid, useful for stapling/stapled with another amino acid residue comprising an olefin group to form a staple through one of the two olefin groups and/or with another amino acid residue comprising an olefin group to form a staple through the other of the two olefin groups
  SITE 6: note = (S)-3-(2-amino-2-carboxyethyl)benzoic acid
  SITE 7: note = 2-amino-2-methylpropanoic acid
  SITE 10: note = L-lysine, useful for stapling/stapled with another amino acid residue comprising a side chain acid group to form a staple through the 6-amino group
  SITE 11: note (S)-3-amino-1-((pent-4-en-1-yloxy)carbonyl)pyrrolidine-3-ca rboxylic acid, useful for stapling/stapled with another amino acid residue comprising an olefin group to form a staple through the olefin group
  SITE 12: note = (S)-2-amino-3-(2-(trifluoromethyl)phenyl)propanoic acid
  SITE 13: note = (S)-2-amino-3-(benzo[b]thiophen-3-yl)propanoic acid
  SITE 14: note = L-glutamic acid, useful for stapling/stapled with another amino acid residue comprising a side chain amino group to form a staple through the 4-carboxyl group
  SITE 15: note = C-term amino
XDXXDXXAFKXXXEL

SEQ ID NO: 1245 - protein, 15 aa, synthetic construct
  SITE 1: note = N-term Acetic Acid
  SITE 1: note = (R)-2-allylpyrrolidine-2-carboxylic acid, useful for stapling/stapled with another amino acid residue comprising an olefin group to form a staple through the olefin group
  SITE 3: note = (S)-2-amino-3-cyclohexylpropanoic acid
  VARIANT 4: note = 2-amino-2-(pent-4-en-1-yl)hept-6-enoic acid, useful for stapling/stapled with another amino acid residue comprising an olefin group to form a staple through one of the two olefin groups and/or with another amino acid residue comprising an olefin group to form a staple through the other of the two olefin groups
  SITE 6: note = (S)-3-(2-amino-2-carboxyethyl)benzoic acid
  SITE 7: note = 2-amino-2-methylpropanoic acid
  SITE 10: note = L-lysine, useful for stapling/stapled with another amino acid residue comprising a side chain acid group to form a staple through the 6-amino group
  SITE 11: note (S)-3-amino-1-((pent-4-en-1-yloxy)carbonyl)pyrrolidine-3-ca rboxylic acid, useful for stapling/stapled with another amino acid residue comprising an olefin group to form a staple through the olefin group
  SITE 12: note = (S)-2-amino-3-(2-(trifluoromethyl)phenyl)propanoic acid
  SITE 13: note = (S)-2-amino-3-(benzo[b]thiophen-3-yl)propanoic acid
  SITE 14: note = L-glutamic acid, useful for stapling/stapled with another amino acid residue comprising a side chain amino group to form a staple through the 4-carboxyl group
  SITE 15: note = C-term amino
XDXXDXXAFKXXXEA

SEQ ID NO: 1246 - protein, 14 aa, synthetic construct
  SITE 1: note = N-term Acetic Acid
  SITE 1: note = (R)-2-allylpyrrolidine-2-carboxylic acid, useful for stapling/stapled with another amino acid residue comprising an olefin group to form a staple through the olefin group
  SITE 3: note = (S)-2-amino-3-cyclohexylpropanoic acid
  VARIANT 4: note = 2-amino-2-(pent-4-en-1-yl)hept-6-enoic acid, useful for stapling/stapled with another amino acid residue comprising an olefin group to form a staple through one of the two olefin groups and/or with another amino acid residue comprising an olefin group to form a staple through the other of the two olefin groups
  SITE 6: note = (S)-3-(2-amino-2-carboxyethyl)benzoic acid
  SITE 7: note = 2-amino-2-methylpropanoic acid
  SITE 10: note = L-lysine, useful for stapling/stapled with another amino acid residue comprising a side chain acid group to form a staple through the 6-amino group
  SITE 11: note (S)-3-amino-1-((pent-4-en-1-yloxy)carbonyl)pyrrolidine-3-ca rboxylic acid, useful for stapling/stapled with another amino acid residue comprising an olefin group to form a staple through the olefin group
  SITE 12: note = (S)-2-amino-3-(2-(trifluoromethyl)phenyl)propanoic acid
  SITE 13: note = (S)-2-amino-3-(benzo[b]thiophen-3-yl)propanoic acid
  SITE 14: note = L-glutamic acid, useful for stapling/stapled with another amino acid residue comprising a side chain amino group to form a staple through the 4-carboxyl group
  SITE 14: note = C-term amino
XDXXDXXAFKXXXE

SEQ ID NO: 1247 - protein, 15 aa, synthetic construct
  SITE 1: note = N-term Acetic Acid
  SITE 1: note = (R)-2-allylpyrrolidine-2-carboxylic acid, useful for stapling/stapled with another amino acid residue comprising an olefin group to form a staple through the olefin group
  SITE 3: note = (S)-2-amino-4,4-dimethylpentanoic acid
  VARIANT 4: note = 2-amino-2-(pent-4-en-1-yl)hept-6-enoic acid, useful for stapling/stapled with another amino acid residue comprising an olefin group to form a staple through one of the two olefin groups and/or with another amino acid residue comprising an olefin group to form a staple through the other of the two olefin groups
  SITE 6: note = (S)-3-(2-amino-2-carboxyethyl)benzoic acid
  SITE 7: note = 2-amino-2-methylpropanoic acid
  SITE 10: note = L-lysine, useful for stapling/stapled with another amino acid residue comprising a side chain acid group to form a staple through the 6-amino group
  SITE 11: note (S)-3-amino-1-((pent-4-en-1-yloxy)carbonyl)pyrrolidine-3-ca rboxylic acid, useful for stapling/stapled with another amino acid residue comprising an olefin group to form a staple through the olefin group
  SITE 12: note = (S)-2-amino-3-(2-(2-phenylacetamido)phenyl)propanoic acid
  SITE 13: note = (S)-2-amino-3-(benzo[b]thiophen-3-yl)propanoic acid
  SITE 14: note = L-glutamic acid, useful for stapling/stapled with another amino acid residue comprising a side chain amino group to form a staple through the 4-carboxyl group
  SITE 15: note = C-term amino
XDXXDXXAFKXXXEA

SEQ ID NO: 1248 - protein, 15 aa, synthetic construct
  SITE 1: note = N-term Acetic Acid
  SITE 1: note = (R)-2-allylpyrrolidine-2-carboxylic acid, useful for stapling/stapled with another amino acid residue comprising an olefin group to form a staple through the olefin group
  SITE 3: note = (S)-2-amino-4,4-dimethylpentanoic acid
  VARIANT 4: note = 2-amino-2-(pent-4-en-1-yl)hept-6-enoic acid, useful for stapling/stapled with another amino acid residue comprising an olefin group to form a staple through one of the two olefin groups and/or with another amino acid residue comprising an olefin group to form a staple through the other of the two olefin groups
  SITE 6: note = (S)-3-(2-amino-2-carboxyethyl)benzoic acid
  SITE 7: note = 2-amino-2-methylpropanoic acid
  SITE 10: note = L-lysine, useful for stapling/stapled with another amino acid residue comprising a side chain acid group to form a staple through the 6-amino group
  SITE 11: note (S)-3-amino-1-((pent-4-en-1-yloxy)carbonyl)pyrrolidine-3-ca rboxylic acid, useful for stapling/stapled with another amino acid residue comprising an olefin group to form a staple through the olefin group
  SITE 12: note = (S)-2-amino-3-(2-benzamidophenyl)propanoic acid
  SITE 13: note = (S)-2-amino-3-(benzo[b]thiophen-3-yl)propanoic acid
  SITE 14: note = L-glutamic acid, useful for stapling/stapled with another amino acid residue comprising a side chain amino group to form a staple through the 4-carboxyl group
  SITE 15: note = C-term amino
XDXXDXXAFKXXXEA

SEQ ID NO: 1249 - protein, 15 aa, synthetic construct
  SITE 1: note = N-term Acetic Acid
  SITE 1: note = (R)-2-allylpyrrolidine-2-carboxylic acid, useful for stapling/stapled with another amino acid residue comprising an olefin group to form a staple through the olefin group
  SITE 3: note = (S)-2-amino-4,4-dimethylpentanoic acid
  VARIANT 4: note = 2-amino-2-(pent-4-en-1-yl)hept-6-enoic acid, useful for stapling/stapled with another amino acid residue comprising an olefin group to form a staple through one of the two olefin groups and/or with another amino acid residue comprising an olefin group to form a staple through the other of the two olefin groups
  SITE 6: note = (S)-3-(2-amino-2-carboxyethyl)benzoic acid
  SITE 7: note = 2-amino-2-methylpropanoic acid
  SITE 10: note = L-lysine, useful for stapling/stapled with another amino acid residue comprising a side chain acid group to form a staple through the 6-amino group
  SITE 11: note (S)-3-amino-1-((pent-4-en-1-yloxy)carbonyl)pyrrolidine-3-ca rboxylic acid, useful for stapling/stapled with another amino acid residue comprising an olefin group to form a staple through the olefin group
  SITE 12: note (S)-3-(2-([1,1'-biphenyl]-4-carboxamido)phenyl)-2-aminoprop anoic acid
  SITE 13: note = (S)-2-amino-3-(benzo[b]thiophen-3-yl)propanoic acid
  SITE 14: note = L-glutamic acid, useful for stapling/stapled with another amino acid residue comprising a side chain amino group to form a staple through the 4-carboxyl group
  SITE 15: note = C-term amino
XDXXDXXAFKXXXEA

SEQ ID NO: 1250 - protein, 15 aa, synthetic construct
  SITE 1: note = N-term Acetic Acid
  SITE 1: note = (R)-2-allylpyrrolidine-2-carboxylic acid, useful for stapling/stapled with another amino acid residue comprising an olefin group to form a staple through the olefin group
  SITE 3: note = (S)-2-amino-4,4-dimethylpentanoic acid
  VARIANT 4: note = 2-amino-2-(pent-4-en-1-yl)hept-6-enoic acid, useful for stapling/stapled with another amino acid residue comprising an olefin group to form a staple through one of the two olefin groups and/or with another amino acid residue comprising an olefin group to form a staple through the other of the two olefin groups
  SITE 6: note = (S)-3-(2-amino-2-carboxyethyl)benzoic acid
  SITE 7: note = 2-amino-2-methylpropanoic acid
  SITE 10: note = L-lysine, useful for stapling/stapled with another amino acid residue comprising a side chain acid group to form a staple through the 6-amino group
  SITE 11: note (S)-3-amino-1-((pent-4-en-1-yloxy)carbonyl)pyrrolidine-3-ca rboxylic acid, useful for stapling/stapled with another amino acid residue comprising an olefin group to form a staple through the olefin group
  SITE 12: note (S)-2-amino-3-(2-(2-(4-methylpiperazin-1-yl)acetamido)pheny l) propanoic acid
  SITE 13: note = (S)-2-amino-3-(benzo[b]thiophen-3-yl)propanoic acid
  SITE 14: note = L-glutamic acid, useful for stapling/stapled with another amino acid residue comprising a side chain amino group to form a staple through the 4-carboxyl group
  SITE 15: note = C-term amino
XDXXDXXAFKXXXEA

SEQ ID NO: 1251 - protein, 15 aa, synthetic construct
  SITE 1: note = N-term Acetic Acid
  SITE 1: note = (R)-2-allylpyrrolidine-2-carboxylic acid, useful for stapling/stapled with another amino acid residue comprising an olefin group to form a staple through the olefin group
  SITE 3: note = (S)-2-amino-4,4-dimethylpentanoic acid
  VARIANT 4: note = 2-amino-2-(pent-4-en-1-yl)hept-6-enoic acid, useful for stapling/stapled with another amino acid residue comprising an olefin group to form a staple through one of the two olefin groups and/or with another amino acid residue comprising an olefin group to form a staple through the other of the two olefin groups
  SITE 6: note = (S)-3-(2-amino-2-carboxyethyl)benzoic acid
  SITE 7: note = 2-amino-2-methylpropanoic acid
  SITE 10: note = L-lysine, useful for stapling/stapled with another amino acid residue comprising a side chain acid group to form a staple through the 6-amino group
  SITE 11: note (S)-3-amino-1-((pent-4-en-1-yloxy)carbonyl)pyrrolidine-3-ca rboxylic acid, useful for stapling/stapled with another amino acid residue comprising an olefin group to form a staple through the olefin group
  SITE 12: note (S)-2-amino-3-(2-(2-(imidazo[1,2-a]pyridin-2-yl)acetamido)p henyl) propanoic acid
  SITE 13: note = (S)-2-amino-3-(benzo[b]thiophen-3-yl)propanoic acid
  SITE 14: note = L-glutamic acid, useful for stapling/stapled with another amino acid residue comprising a side chain amino group to form a staple through the 4-carboxyl group
  SITE 15: note = C-term amino
XDXXDXXAFKXXXEA

SEQ ID NO: 1252 - protein, 15 aa, synthetic construct
  SITE 1: note = N-term Acetic Acid
  SITE 1: note = (R)-2-allylpyrrolidine-2-carboxylic acid, useful for stapling/stapled with another amino acid residue comprising an olefin group to form a staple through the olefin group
  SITE 3: note = (S)-2-amino-4,4-dimethylpentanoic acid
  VARIANT 4: note = 2-amino-2-(pent-4-en-1-yl)hept-6-enoic acid, useful for stapling/stapled with another amino acid residue comprising an olefin group to form a staple through one of the two olefin groups and/or with another amino acid residue comprising an olefin group to form a staple through the other of the two olefin groups
  SITE 6: note = (S)-3-(2-amino-2-carboxyethyl)benzoic acid
  SITE 7: note = 2-amino-2-methylpropanoic acid
  SITE 10: note = L-lysine, useful for stapling/stapled with another amino acid residue comprising a side chain acid group to form a staple through the 6-amino group
  SITE 11: note (S)-3-amino-1-((pent-4-en-1-yloxy)carbonyl)pyrrolidine-3-ca rboxylic acid, useful for stapling/stapled with another amino acid residue comprising an olefin group to form a staple through the olefin group
  SITE 12: note (S)-2-amino-3-(2-(2-(pyridin-3-yl)acetamido)phenyl)propanoi c acid
  SITE 13: note = (S)-2-amino-3-(benzo[b]thiophen-3-yl)propanoic acid
  SITE 14: note = L-glutamic acid, useful for stapling/stapled with another amino acid residue comprising a side chain amino group to form a staple through the 4-carboxyl group
  SITE 15: note = C-term amino
XDXXDXXAFKXXXEA

SEQ ID NO: 1253 - protein, 15 aa, synthetic construct
  SITE 1: note = N-term Acetic Acid
  SITE 1: note = (R)-2-allylpyrrolidine-2-carboxylic acid, useful for stapling/stapled with another amino acid residue comprising an olefin group to form a staple through the olefin group
  SITE 3: note = (S)-2-amino-4,4-dimethylpentanoic acid
  VARIANT 4: note = 2-amino-2-(pent-4-en-1-yl)hept-6-enoic acid, useful for stapling/stapled with another amino acid residue comprising an olefin group to form a staple through one of the two olefin groups and/or with another amino acid residue comprising an olefin group to form a staple through the other of the two olefin groups
  SITE 6: note = (S)-3-(2-amino-2-carboxyethyl)benzoic acid
  SITE 7: note = 2-amino-2-methylpropanoic acid
  SITE 10: note = L-lysine, useful for stapling/stapled with another amino acid residue comprising a side chain acid group to form a staple through the 6-amino group
  SITE 11: note (S)-3-amino-1-((pent-4-en-1-yloxy)carbonyl)pyrrolidine-3-ca rboxylic acid, useful for stapling/stapled with another amino acid residue comprising an olefin group to form a staple through the olefin group
  SITE 12: note (S)-2-amino-3-(2-(1-(pyridin-2-yl)cyclopropane-1-carboxamid o) phenyl)propanoic acid
  SITE 13: note = (S)-2-amino-3-(benzo[b]thiophen-3-yl)propanoic acid
  SITE 14: note = L-glutamic acid, useful for stapling/stapled with another amino acid residue comprising a side chain amino group to form a staple through the 4-carboxyl group
  SITE 15: note = C-term amino
XDXXDXXAFKXXXEA

SEQ ID NO: 1254 - protein, 15 aa, synthetic construct
  SITE 1: note = N-term Acetic Acid
  SITE 1: note = (S)-2-amino-2-methylhept-6-enoic acid, useful for stapling/stapled with another amino acid residue comprising an olefin group to form a staple through the olefin group
  SITE 4: note = (S)-2-amino-4,4-dimethylpentanoic acid
  VARIANT 5: note = 2-amino-2-(pent-4-en-1-yl)hept-6-enoic acid, useful for stapling/stapled with another amino acid residue comprising an olefin group to form a staple through one of the two olefin groups and/or with another amino acid residue comprising an olefin group to form a staple through the other of the two olefin groups
  SITE 7: note = (S)-3-(2-amino-2-carboxyethyl)benzoic acid
  SITE 8: note = 2-amino-2-methylpropanoic acid
  SITE 11: note = L-lysine, useful for stapling/stapled with another amino acid residue comprising a side chain acid group to form a staple through the 6-amino group
  SITE 12: note (S)-3-amino-1-((pent-4-en-1-yloxy)carbonyl)pyrrolidine-3-ca rboxylic acid, useful for stapling/stapled with another amino acid residue comprising an olefin group to form a staple through the olefin group
  SITE 14: note = (S)-2-amino-3-(3,4-dichlorophenyl)propanoic acid
  SITE 15: note = L-glutamic acid, useful for stapling/stapled with another amino acid residue comprising a side chain amino group to form a staple through the 4-carboxyl group
  SITE 15: note = C-term amino
XDDXXDXXAFKXFXE

SEQ ID NO: 1255 - protein, 15 aa, synthetic construct
  SITE 1: note = N-term Acetic Acid
  SITE 1: note = (S)-2-amino-2-methylhept-6-enoic acid, useful for stapling/stapled with another amino acid residue comprising an olefin group to form a staple through the olefin group
  SITE 4: note = (S)-2-amino-4,4-dimethylpentanoic acid
  VARIANT 5: note = 2-amino-2-(pent-4-en-1-yl)hept-6-enoic acid, useful for stapling/stapled with another amino acid residue comprising an olefin group to form a staple through one of the two olefin groups and/or with another amino acid residue comprising an olefin group to form a staple through the other of the two olefin groups
  SITE 7: note = (S)-3-(2-amino-2-carboxyethyl)benzoic acid
  SITE 8: note = 2-amino-2-methylpropanoic acid
  SITE 11: note = L-lysine, useful for stapling/stapled with another amino acid residue comprising a side chain acid group to form a staple through the 6-amino group
  SITE 12: note (S)-3-amino-1-((pent-4-en-1-yloxy)carbonyl)pyrrolidine-3-ca rboxylic acid, useful for stapling/stapled with another amino acid residue comprising an olefin group to form a staple through the olefin group
  SITE 14: note = (S)-2-amino-3-(3,4-dichlorophenyl)propanoic acid
  SITE 15: note = L-glutamic acid, useful for stapling/stapled with another amino acid residue comprising a side chain amino group to form a staple through the 4-carboxyl group
  SITE 15: note = C-term amino
XDNXXDXXAFKXFXE

SEQ ID NO: 1256 - protein, 15 aa, synthetic construct
  SITE 1: note = N-term Acetic Acid
  SITE 1: note = (S)-2-amino-2-methylhept-6-enoic acid, useful for stapling/stapled with another amino acid residue comprising an olefin group to form a staple through the olefin group
  SITE 4: note = (S)-2-amino-4,4-dimethylpentanoic acid
  VARIANT 5: note = 2-amino-2-(pent-4-en-1-yl)hept-6-enoic acid, useful for stapling/stapled with another amino acid residue comprising an olefin group to form a staple through one of the two olefin groups and/or with another amino acid residue comprising an olefin group to form a staple through the other of the two olefin groups
  SITE 7: note = (S)-3-(2-amino-2-carboxyethyl)benzoic acid
  SITE 8: note = 2-amino-2-methylpropanoic acid
  SITE 11: note = L-lysine, useful for stapling/stapled with another amino acid residue comprising a side chain acid group to form a staple through the 6-amino group
  SITE 12: note (S)-3-amino-1-((pent-4-en-1-yloxy)carbonyl)pyrrolidine-3-ca rboxylic acid, useful for stapling/stapled with another amino acid residue comprising an olefin group to form a staple through the olefin group
  SITE 14: note = (S)-2-amino-3-(3,4-dichlorophenyl)propanoic acid
  SITE 15: note = L-glutamic acid, useful for stapling/stapled with another amino acid residue comprising a side chain amino group to form a staple through the 4-carboxyl group
  SITE 15: note = C-term amino
XDSXXDXXAFKXFXE

SEQ ID NO: 1257 - protein, 15 aa, synthetic construct
  SITE 1: note = N-term Acetic Acid
  SITE 1: note = (S)-2-amino-2-methylhept-6-enoic acid, useful for stapling/stapled with another amino acid residue comprising an olefin group to form a staple through the olefin group
  SITE 4: note = (S)-2-amino-4,4-dimethylpentanoic acid
  VARIANT 5: note = 2-amino-2-(pent-4-en-1-yl)hept-6-enoic acid, useful for stapling/stapled with another amino acid residue comprising an olefin group to form a staple through one of the two olefin groups and/or with another amino acid residue comprising an olefin group to form a staple through the other of the two olefin groups
  SITE 7: note = (S)-3-(2-amino-2-carboxyethyl)benzoic acid
  SITE 8: note = 2-amino-2-methylpropanoic acid
  SITE 11: note = L-lysine, useful for stapling/stapled with another amino acid residue comprising a side chain acid group to form a staple through the 6-amino group
  SITE 12: note (S)-3-amino-1-((pent-4-en-1-yloxy)carbonyl)pyrrolidine-3-ca rboxylic acid, useful for stapling/stapled with another amino acid residue comprising an olefin group to form a staple through the olefin group
  SITE 14: note = (S)-2-amino-3-(3,4-dichlorophenyl)propanoic acid
  SITE 15: note = L-glutamic acid, useful for stapling/stapled with another amino acid residue comprising a side chain amino group to form a staple through the 4-carboxyl group
  SITE 15: note = C-term amino
XDDXXEXXAFKXFXE

SEQ ID NO: 1258 - protein, 15 aa, synthetic construct
  SITE 1: note = N-term Acetic Acid
  SITE 1: note = (S)-2-amino-2-methylhept-6-enoic acid, useful for stapling/stapled with another amino acid residue comprising an olefin group to form a staple through the olefin group
  SITE 4: note = (S)-2-amino-4,4-dimethylpentanoic acid
  VARIANT 5: note = 2-amino-2-(pent-4-en-1-yl)hept-6-enoic acid, useful for stapling/stapled with another amino acid residue comprising an olefin group to form a staple through one of the two olefin groups and/or with another amino acid residue comprising an olefin group to form a staple through the other of the two olefin groups
  SITE 7: note = (S)-3-(2-amino-2-carboxyethyl)benzoic acid
  SITE 8: note = 2-amino-2-methylpropanoic acid
  SITE 11: note = L-lysine, useful for stapling/stapled with another amino acid residue comprising a side chain acid group to form a staple through the 6-amino group
  SITE 12: note (S)-3-amino-1-((pent-4-en-1-yloxy)carbonyl)pyrrolidine-3-ca rboxylic acid, useful for stapling/stapled with another amino acid residue comprising an olefin group to form a staple through the olefin group
  SITE 14: note = (S)-2-amino-3-(3,4-dichlorophenyl)propanoic acid
  SITE 15: note = L-glutamic acid, useful for stapling/stapled with another amino acid residue comprising a side chain amino group to form a staple through the 4-carboxyl group
  SITE 15: note = C-term amino
XENXXDXXAFKXFXE

SEQ ID NO: 1259 - protein, 15 aa, synthetic construct
  SITE 1: note = N-term Acetic Acid
  SITE 1: note = (S)-2-amino-2-methylhept-6-enoic acid, useful for stapling/stapled with another amino acid residue comprising an olefin group to form a staple through the olefin group
  SITE 4: note = (S)-2-amino-4,4-dimethylpentanoic acid
  VARIANT 5: note = 2-amino-2-(pent-4-en-1-yl)hept-6-enoic acid, useful for stapling/stapled with another amino acid residue comprising an olefin group to form a staple through one of the two olefin groups and/or with another amino acid residue comprising an olefin group to form a staple through the other of the two olefin groups
  SITE 7: note = (S)-3-(2-amino-2-carboxyethyl)benzoic acid
  SITE 8: note = 2-amino-2-methylpropanoic acid
  SITE 11: note = L-lysine, useful for stapling/stapled with another amino acid residue comprising a side chain acid group to form a staple through the 6-amino group
  SITE 12: note (S)-3-amino-1-((pent-4-en-1-yloxy)carbonyl)pyrrolidine-3-ca rboxylic acid, useful for stapling/stapled with another amino acid residue comprising an olefin group to form a staple through the olefin group
  SITE 14: note = (S)-2-amino-3-(3,4-dichlorophenyl)propanoic acid
  SITE 15: note = L-glutamic acid, useful for stapling/stapled with another amino acid residue comprising a side chain amino group to form a staple through the 4-carboxyl group
  SITE 15: note = C-term amino
XESXXDXXAFKXFXE

SEQ ID NO: 1260 - protein, 15 aa, synthetic construct
  SITE 1: note = N-term Acetic Acid
  SITE 1: note = (S)-2-amino-2-methylhept-6-enoic acid, useful for stapling/stapled with another amino acid residue comprising an olefin group to form a staple through the olefin group
  SITE 4: note = (S)-2-amino-4,4-dimethylpentanoic acid
  VARIANT 5: note = 2-amino-2-(pent-4-en-1-yl)hept-6-enoic acid, useful for stapling/stapled with another amino acid residue comprising an olefin group to form a staple through one of the two olefin groups and/or with another amino acid residue comprising an olefin group to form a staple through the other of the two olefin groups
  SITE 7: note = (S)-3-(2-amino-2-carboxyethyl)benzoic acid
  SITE 8: note = 2-amino-2-methylpropanoic acid
  SITE 11: note = L-lysine, useful for stapling/stapled with another amino acid residue comprising a side chain acid group to form a staple through the 6-amino group
  SITE 12: note (S)-3-amino-1-((pent-4-en-1-yloxy)carbonyl)pyrrolidine-3-ca rboxylic acid, useful for stapling/stapled with another amino acid residue comprising an olefin group to form a staple through the olefin group
  SITE 14: note = (S)-2-amino-3-(3,4-dichlorophenyl)propanoic acid
  SITE 15: note = L-glutamic acid, useful for stapling/stapled with another amino acid residue comprising a side chain amino group to form a staple through the 4-carboxyl group
  SITE 15: note = C-term amino
XEDXXEXXAFKXFXE

SEQ ID NO: 1261 - protein, 14 aa, synthetic construct
  SITE 1: note = N-term Acetic Acid
  SITE 1: note = (R)-2-allylpyrrolidine-2-carboxylic acid, useful for stapling/stapled with another amino acid residue comprising an olefin group to form a staple through the olefin group
  SITE 3: note = (S)-2-amino-3,3-diphenylpropanoic acid
  VARIANT 4: note = 2-amino-2-(pent-4-en-1-yl)hept-6-enoic acid, useful for stapling/stapled with another amino acid residue comprising an olefin group to form a staple through one of the two olefin groups and/or with another amino acid residue comprising an olefin group to form a staple through the other of the two olefin groups
  SITE 6: note = (S)-3-(2-amino-2-carboxyethyl)benzoic acid
  SITE 7: note = (S)-2-aminohexanoic acid
  SITE 10: note = L-lysine, useful for stapling/stapled with another amino acid residue comprising a side chain acid group to form a staple through the 6-amino group
  SITE 11: note (S)-3-amino-1-((pent-4-en-1-yloxy)carbonyl)pyrrolidine-3-ca rboxylic acid, useful for stapling/stapled with another amino acid residue comprising an olefin group to form a staple through the olefin group
  SITE 12: note = (S)-2-amino-3-(thiophen-3-yl)propanoic acid
  SITE 13: note = (S)-2-amino-3-(benzo[b]thiophen-3-yl)propanoic acid
  SITE 14: note = L-glutamic acid, useful for stapling/stapled with another amino acid residue comprising a side chain amino group to form a staple through the 4-carboxyl group
  SITE 14: note = C-term amino
XNXXDXXAFKXXXE

SEQ ID NO: 1262 - protein, 14 aa, synthetic construct
  SITE 1: note = N-term Acetic Acid
  SITE 1: note = (R)-2-allylpyrrolidine-2-carboxylic acid, useful for stapling/stapled with another amino acid residue comprising an olefin group to form a staple through the olefin group
  SITE 3: note = (S)-2-amino-3,3-diphenylpropanoic acid
  VARIANT 4: note = 2-amino-2-(pent-4-en-1-yl)hept-6-enoic acid, useful for stapling/stapled with another amino acid residue comprising an olefin group to form a staple through one of the two olefin groups and/or with another amino acid residue comprising an olefin group to form a staple through the other of the two olefin groups
  SITE 6: note = (S)-3-(2-amino-2-carboxyethyl)benzoic acid
  SITE 7: note = (S)-2-aminohexanoic acid
  SITE 10: note = L-lysine, useful for stapling/stapled with another amino acid residue comprising a side chain acid group to form a staple through the 6-amino group
  SITE 11: note (S)-3-amino-1-((pent-4-en-1-yloxy)carbonyl)pyrrolidine-3-ca rboxylic acid, useful for stapling/stapled with another amino acid residue comprising an olefin group to form a staple through the olefin group
  SITE 12: note = (S)-2-amino-3-(thiophen-3-yl)propanoic acid
  SITE 13: note = (S)-2-amino-3-(benzo[b]thiophen-3-yl)propanoic acid
  SITE 14: note = L-glutamic acid, useful for stapling/stapled with another amino acid residue comprising a side chain amino group to form a staple through the 4-carboxyl group
  SITE 14: note = C-term amino
XSXXDXXAFKXXXE

SEQ ID NO: 1263 - protein, 14 aa, synthetic construct
  SITE 1: note = N-term Acetic Acid
  SITE 1: note = (R)-2-allylpyrrolidine-2-carboxylic acid, useful for stapling/stapled with another amino acid residue comprising an olefin group to form a staple through the olefin group
  SITE 3: note = (S)-2-amino-3,3-diphenylpropanoic acid
  VARIANT 4: note = 2-amino-2-(pent-4-en-1-yl)hept-6-enoic acid, useful for stapling/stapled with another amino acid residue comprising an olefin group to form a staple through one of the two olefin groups and/or with another amino acid residue comprising an olefin group to form a staple through the other of the two olefin groups
  SITE 6: note = (S)-3-(2-amino-2-carboxyethyl)benzoic acid
  SITE 7: note = (S)-2-aminohexanoic acid
  SITE 10: note = L-lysine, useful for stapling/stapled with another amino acid residue comprising a side chain acid group to form a staple through the 6-amino group
  SITE 11: note (S)-3-amino-1-((pent-4-en-1-yloxy)carbonyl)pyrrolidine-3-ca rboxylic acid, useful for stapling/stapled with another amino acid residue comprising an olefin group to form a staple through the olefin group
  SITE 12: note = (S)-2-amino-3-(thiophen-3-yl)propanoic acid
  SITE 13: note = (S)-2-amino-3-(benzo[b]thiophen-3-yl)propanoic acid
  SITE 14: note = L-glutamic acid, useful for stapling/stapled with another amino acid residue comprising a side chain amino group to form a staple through the 4-carboxyl group
  SITE 14: note = C-term amino
XTXXDXXAFKXXXE

SEQ ID NO: 1264 - protein, 14 aa, synthetic construct
  SITE 1: note = N-term Acetic Acid
  SITE 1: note = (R)-2-allylpyrrolidine-2-carboxylic acid, useful for stapling/stapled with another amino acid residue comprising an olefin group to form a staple through the olefin group
  SITE 3: note = (S)-2-amino-3,3-diphenylpropanoic acid
  VARIANT 4: note = 2-amino-2-(pent-4-en-1-yl)hept-6-enoic acid, useful for stapling/stapled with another amino acid residue comprising an olefin group to form a staple through one of the two olefin groups and/or with another amino acid residue comprising an olefin group to form a staple through the other of the two olefin groups
  SITE 6: note = (S)-3-(2-amino-2-carboxyethyl)benzoic acid
  SITE 7: note = (S)-2-aminohexanoic acid
  SITE 10: note = L-lysine, useful for stapling/stapled with another amino acid residue comprising a side chain acid group to form a staple through the 6-amino group
  SITE 11: note (S)-3-amino-1-((pent-4-en-1-yloxy)carbonyl)pyrrolidine-3-ca rboxylic acid, useful for stapling/stapled with another amino acid residue comprising an olefin group to form a staple through the olefin group
  SITE 12: note = (S)-2-amino-3-(thiophen-3-yl)propanoic acid
  SITE 13: note = (S)-2-amino-3-(benzo[b]thiophen-3-yl)propanoic acid
  SITE 14: note = L-glutamic acid, useful for stapling/stapled with another amino acid residue comprising a side chain amino group to form a staple through the 4-carboxyl group
  SITE 14: note = C-term amino
XDXXSXXAFKXXXE

SEQ ID NO: 1265 - protein, 14 aa, synthetic construct
  SITE 1: note = N-term Acetic Acid
  SITE 1: note = (R)-2-allylpyrrolidine-2-carboxylic acid, useful for stapling/stapled with another amino acid residue comprising an olefin group to form a staple through the olefin group
  SITE 3: note = (S)-2-amino-3,3-diphenylpropanoic acid
  VARIANT 4: note = 2-amino-2-(pent-4-en-1-yl)hept-6-enoic acid, useful for stapling/stapled with another amino acid residue comprising an olefin group to form a staple through one of the two olefin groups and/or with another amino acid residue comprising an olefin group to form a staple through the other of the two olefin groups
  SITE 6: note = (S)-3-(2-amino-2-carboxyethyl)benzoic acid
  SITE 7: note = (S)-2-aminohexanoic acid
  SITE 10: note = L-lysine, useful for stapling/stapled with another amino acid residue comprising a side chain acid group to form a staple through the 6-amino group
  SITE 11: note (S)-3-amino-1-((pent-4-en-1-yloxy)carbonyl)pyrrolidine-3-ca rboxylic acid, useful for stapling/stapled with another amino acid residue comprising an olefin group to form a staple through the olefin group
  SITE 12: note = (S)-2-amino-3-(thiophen-3-yl)propanoic acid
  SITE 13: note = (S)-2-amino-3-(benzo[b]thiophen-3-yl)propanoic acid
  SITE 14: note = L-glutamic acid, useful for stapling/stapled with another amino acid residue comprising a side chain amino group to form a staple through the 4-carboxyl group
  SITE 14: note = C-term amino
XDXXTXXAFKXXXE

SEQ ID NO: 1266 - protein, 14 aa, synthetic construct
  SITE 1: note = N-term Acetic Acid
  SITE 1: note = (R)-2-allylpyrrolidine-2-carboxylic acid, useful for stapling/stapled with another amino acid residue comprising an olefin group to form a staple through the olefin group
  SITE 3: note = (S)-2-amino-3,3-diphenylpropanoic acid
  VARIANT 4: note = 2-amino-2-(pent-4-en-1-yl)hept-6-enoic acid, useful for stapling/stapled with another amino acid residue comprising an olefin group to form a staple through one of the two olefin groups and/or with another amino acid residue comprising an olefin group to form a staple through the other of the two olefin groups
  SITE 5: note = L-allothreonine
  SITE 6: note = (S)-3-(2-amino-2-carboxyethyl)benzoic acid
  SITE 7: note = (S)-2-aminohexanoic acid
  SITE 10: note = L-lysine, useful for stapling/stapled with another amino acid residue comprising a side chain acid group to form a staple through the 6-amino group
  SITE 11: note (S)-3-amino-1-((pent-4-en-1-yloxy)carbonyl)pyrrolidine-3-ca rboxylic acid, useful for stapling/stapled with another amino acid residue comprising an olefin group to form a staple through the olefin group
  SITE 12: note = (S)-2-amino-3-(thiophen-3-yl)propanoic acid
  SITE 13: note = (S)-2-amino-3-(benzo[b]thiophen-3-yl)propanoic acid
  SITE 14: note = L-glutamic acid, useful for stapling/stapled with another amino acid residue comprising a side chain amino group to form a staple through the 4-carboxyl group
  SITE 14: note = C-term amino
XDXXTXXAFKXXXE

SEQ ID NO: 1267 - protein, 14 aa, synthetic construct
  SITE 1: note = N-term Acetic Acid
  SITE 1: note = (R)-2-allylpyrrolidine-2-carboxylic acid, useful for stapling/stapled with another amino acid residue comprising an olefin group to form a staple through the olefin group
  SITE 3: note = (S)-2-amino-3,3-diphenylpropanoic acid
  VARIANT 4: note = 2-amino-2-(pent-4-en-1-yl)hept-6-enoic acid, useful for stapling/stapled with another amino acid residue comprising an olefin group to form a staple through one of the two olefin groups and/or with another amino acid residue comprising an olefin group to form a staple through the other of the two olefin groups
  SITE 5: note = L-homoserine
  SITE 6: note = (S)-3-(2-amino-2-carboxyethyl)benzoic acid
  SITE 7: note = (S)-2-aminohexanoic acid
  SITE 10: note = L-lysine, useful for stapling/stapled with another amino acid residue comprising a side chain acid group to form a staple through the 6-amino group
  SITE 11: note (S)-3-amino-1-((pent-4-en-1-yloxy)carbonyl)pyrrolidine-3-ca rboxylic acid, useful for stapling/stapled with another amino acid residue comprising an olefin group to form a staple through the olefin group
  SITE 12: note = (S)-2-amino-3-(thiophen-3-yl)propanoic acid
  SITE 13: note = (S)-2-amino-3-(benzo[b]thiophen-3-yl)propanoic acid
  SITE 14: note = L-glutamic acid, useful for stapling/stapled with another amino acid residue comprising a side chain amino group to form a staple through the 4-carboxyl group
  SITE 14: note = C-term amino
XDXXSXXAFKXXXE

SEQ ID NO: 1268 - protein, 14 aa, synthetic construct
  SITE 1: note = N-term Acetic Acid
  SITE 1: note = (R)-2-allylpyrrolidine-2-carboxylic acid, useful for stapling/stapled with another amino acid residue comprising an olefin group to form a staple through the olefin group
  SITE 2: note = L-allothreonine
  SITE 3: note = (S)-2-amino-3,3-diphenylpropanoic acid
  VARIANT 4: note = 2-amino-2-(pent-4-en-1-yl)hept-6-enoic acid, useful for stapling/stapled with another amino acid residue comprising an olefin group to form a staple through one of the two olefin groups and/or with another amino acid residue comprising an olefin group to form a staple through the other of the two olefin groups
  SITE 6: note = (S)-3-(2-amino-2-carboxyethyl)benzoic acid
  SITE 7: note = (S)-2-aminohexanoic acid
  SITE 9: note = (S)-2-amino-3-(thiophen-3-yl)propanoic acid
  SITE 10: note = L-lysine, useful for stapling/stapled with another amino acid residue comprising a side chain acid group to form a staple through the 6-amino group
  SITE 11: note (S)-3-amino-1-((pent-4-en-1-yloxy)carbonyl)pyrrolidine-3-ca rboxylic acid, useful for stapling/stapled with another amino acid residue comprising an olefin group to form a staple through the olefin group
  SITE 12: note = (S)-2-amino-3-(thiophen-3-yl)propanoic acid
  SITE 13: note = (S)-2-amino-3-(benzo[b]thiophen-3-yl)propanoic acid
  SITE 14: note = L-glutamic acid, useful for stapling/stapled with another amino acid residue comprising a side chain amino group to form a staple through the 4-carboxyl group
  SITE 14: note = C-term amino
XTXXDXXAXKXXXE

SEQ ID NO: 1269 - protein, 15 aa, synthetic construct
  SITE 1: note = N-term Acetic Acid
  SITE 1: note = (S)-2-amino-2-methylhept-6-enoic acid, useful for stapling/stapled with another amino acid residue comprising an olefin group to form a staple through the olefin group
  SITE 4: note = (S)-2-amino-3,3-diphenylpropanoic acid
  VARIANT 5: note = 2-amino-2-(pent-4-en-1-yl)hept-6-enoic acid, useful for stapling/stapled with another amino acid residue comprising an olefin group to form a staple through one of the two olefin groups and/or with another amino acid residue comprising an olefin group to form a staple through the other of the two olefin groups
  SITE 7: note = (S)-3-(2-amino-2-carboxyethyl)benzoic acid
  SITE 8: note = (S)-2-aminohexanoic acid
  SITE 11: note = L-lysine, useful for stapling/stapled with another amino acid residue comprising a side chain acid group to form a staple through the 6-amino group
  SITE 12: note (S)-3-amino-1-((pent-4-en-1-yloxy)carbonyl)pyrrolidine-3-ca rboxylic acid, useful for stapling/stapled with another amino acid residue comprising an olefin group to form a staple through the olefin group
  SITE 14: note = (S)-2-amino-3-(3,4-dichlorophenyl)propanoic acid
  SITE 15: note = L-glutamic acid, useful for stapling/stapled with another amino acid residue comprising a side chain amino group to form a staple through the 4-carboxyl group
  SITE 15: note = C-term amino
XADXXDXXAFKXFXE

SEQ ID NO: 1270 - protein, 15 aa, synthetic construct
  SITE 1: note = N-term Acetic Acid
  SITE 1: note = (S)-2-amino-2-methylhept-6-enoic acid, useful for stapling/stapled with another amino acid residue comprising an olefin group to form a staple through the olefin group
  SITE 4: note = (S)-2-amino-3,3-diphenylpropanoic acid
  VARIANT 5: note = 2-amino-2-(pent-4-en-1-yl)hept-6-enoic acid, useful for stapling/stapled with another amino acid residue comprising an olefin group to form a staple through one of the two olefin groups and/or with another amino acid residue comprising an olefin group to form a staple through the other of the two olefin groups
  SITE 7: note = (S)-3-(2-amino-2-carboxyethyl)benzoic acid
  SITE 8: note = (S)-2-aminohexanoic acid
  SITE 11: note = L-lysine, useful for stapling/stapled with another amino acid residue comprising a side chain acid group to form a staple through the 6-amino group
  SITE 12: note (S)-3-amino-1-((but-3-en-1-yloxy)carbonyl)pyrrolidine-3-car boxylic acid, useful for stapling/stapled with another amino acid residue comprising an olefin group to form a staple through the olefin group
  SITE 14: note = (S)-2-amino-3-(3,4-dichlorophenyl)propanoic acid
  SITE 15: note = L-glutamic acid, useful for stapling/stapled with another amino acid residue comprising a side chain amino group to form a staple through the 4-carboxyl group
  SITE 15: note = C-term amino
XADXXDXXAFKXFXE

SEQ ID NO: 1271 - protein, 15 aa, synthetic construct
  SITE 1: note = N-term Acetic Acid
  SITE 1: note = (S)-2-amino-2-methyloct-7-enoic acid, useful for stapling/stapled with another amino acid residue comprising an olefin group to form a staple through the olefin group
  SITE 4: note = (S)-2-amino-3,3-diphenylpropanoic acid
  VARIANT 5: note = 2-amino-2-(pent-4-en-1-yl)hept-6-enoic acid, useful for stapling/stapled with another amino acid residue comprising an olefin group to form a staple through one of the two olefin groups and/or with another amino acid residue comprising an olefin group to form a staple through the other of the two olefin groups
  SITE 7: note = (S)-3-(2-amino-2-carboxyethyl)benzoic acid
  SITE 8: note = (S)-2-aminohexanoic acid
  SITE 11: note = L-lysine, useful for stapling/stapled with another amino acid residue comprising a side chain acid group to form a staple through the 6-amino group
  SITE 12: note (S)-3-amino-1-((pent-4-en-1-yloxy)carbonyl)pyrrolidine-3-ca rboxylic acid, useful for stapling/stapled with another amino acid residue comprising an olefin group to form a staple through the olefin group
  SITE 14: note = (S)-2-amino-3-(3,4-dichlorophenyl)propanoic acid
  SITE 15: note = L-glutamic acid, useful for stapling/stapled with another amino acid residue comprising a side chain amino group to form a staple through the 4-carboxyl group
  SITE 15: note = C-term amino
XADXXDXXAFKXFXE

SEQ ID NO: 1272 - protein, 15 aa, synthetic construct
  SITE 1: note = N-term Acetic Acid
  SITE 1: note = (S)-2-amino-2-methyloct-7-enoic acid, useful for stapling/stapled with another amino acid residue comprising an olefin group to form a staple through the olefin group
  SITE 4: note = (S)-2-amino-3,3-diphenylpropanoic acid
  VARIANT 5: note = 2-amino-2-(pent-4-en-1-yl)hept-6-enoic acid, useful for stapling/stapled with another amino acid residue comprising an olefin group to form a staple through one of the two olefin groups and/or with another amino acid residue comprising an olefin group to form a staple through the other of the two olefin groups
  SITE 7: note = (S)-3-(2-amino-2-carboxyethyl)benzoic acid
  SITE 8: note = (S)-2-aminohexanoic acid
  SITE 11: note = L-lysine, useful for stapling/stapled with another amino acid residue comprising a side chain acid group to form a staple through the 6-amino group
  SITE 12: note (S)-3-amino-1-((but-3-en-1-yloxy)carbonyl)pyrrolidine-3-car boxylic acid, useful for stapling/stapled with another amino acid residue comprising an olefin group to form a staple through the olefin group
  SITE 14: note = (S)-2-amino-3-(3,4-dichlorophenyl)propanoic acid
  SITE 15: note = L-glutamic acid, useful for stapling/stapled with another amino acid residue comprising a side chain amino group to form a staple through the 4-carboxyl group
  SITE 15: note = C-term amino
XADXXDXXAFKXFXE

SEQ ID NO: 1273 - protein, 15 aa, synthetic construct
  SITE 1: note = N-term Acetic Acid
  SITE 1: note = (S)-2-amino-2-methylhept-6-enoic acid, useful for stapling/stapled with another amino acid residue comprising an olefin group to form a staple through the olefin group
  SITE 4: note = (S)-2-amino-3,3-diphenylpropanoic acid
  VARIANT 5: note = 2-amino-2-(pent-4-en-1-yl)hept-6-enoic acid, useful for stapling/stapled with another amino acid residue comprising an olefin group to form a staple through one of the two olefin groups and/or with another amino acid residue comprising an olefin group to form a staple through the other of the two olefin groups
  SITE 7: note = (S)-3-(2-amino-2-carboxyethyl)benzoic acid
  SITE 8: note = 2-amino-2-methylpropanoic acid
  SITE 11: note = L-lysine, useful for stapling/stapled with another amino acid residue comprising a side chain acid group to form a staple through the 6-amino group
  SITE 12: note (S)-3-amino-1-((pent-4-en-1-yloxy)carbonyl)pyrrolidine-3-ca rboxylic acid, useful for stapling/stapled with another amino acid residue comprising an olefin group to form a staple through the olefin group
  SITE 14: note = (S)-2-amino-3-(3,4-dichlorophenyl)propanoic acid
  SITE 15: note = L-glutamic acid, useful for stapling/stapled with another amino acid residue comprising a side chain amino group to form a staple through the 4-carboxyl group
  SITE 15: note = C-term amino
XADXXDXXAFKXFXE

SEQ ID NO: 1274 - protein, 15 aa, synthetic construct
  SITE 1: note = N-term Acetic Acid
  SITE 1: note = (S)-2-amino-2-methylhept-6-enoic acid, useful for stapling/stapled with another amino acid residue comprising an olefin group to form a staple through the olefin group
  SITE 4: note = (S)-2-amino-3,3-diphenylpropanoic acid
  VARIANT 5: note = 2-amino-2-(pent-4-en-1-yl)hept-6-enoic acid, useful for stapling/stapled with another amino acid residue comprising an olefin group to form a staple through one of the two olefin groups and/or with another amino acid residue comprising an olefin group to form a staple through the other of the two olefin groups
  SITE 7: note = (S)-3-(2-amino-2-carboxyethyl)benzoic acid
  SITE 8: note = 2-amino-2-methylpropanoic acid
  SITE 11: note = L-lysine, useful for stapling/stapled with another amino acid residue comprising a side chain acid group to form a staple through the 6-amino group
  SITE 12: note (S)-3-amino-1-((but-3-en-1-yloxy)carbonyl)pyrrolidine-3-car boxylic acid, useful for stapling/stapled with another amino acid residue comprising an olefin group to form a staple through the olefin group
  SITE 14: note = (S)-2-amino-3-(3,4-dichlorophenyl)propanoic acid
  SITE 15: note = L-glutamic acid, useful for stapling/stapled with another amino acid residue comprising a side chain amino group to form a staple through the 4-carboxyl group
  SITE 15: note = C-term amino
XADXXDXXAFKXFXE

SEQ ID NO: 1275 - protein, 15 aa, synthetic construct
  SITE 1: note = N-term Acetic Acid
  SITE 1: note = (S)-2-amino-2-methylhept-6-enoic acid, useful for stapling/stapled with another amino acid residue comprising an olefin group to form a staple through the olefin group
  SITE 4: note = (S)-2-amino-3,3-diphenylpropanoic acid
  VARIANT 5: note = 2-amino-2-(pent-4-en-1-yl)hept-6-enoic acid, useful for stapling/stapled with another amino acid residue comprising an olefin group to form a staple through one of the two olefin groups and/or with another amino acid residue comprising an olefin group to form a staple through the other of the two olefin groups
  SITE 7: note = (S)-3-(2-amino-2-carboxyethyl)benzoic acid
  SITE 8: note = 2-amino-2-methylpropanoic acid
  SITE 11: note = L-lysine, useful for stapling/stapled with another amino acid residue comprising a side chain acid group to form a staple through the 6-amino group
  SITE 12: note (S)-3-amino-1-((but-3-en-1-yloxy)carbonyl)pyrrolidine-3-car boxylic acid, useful for stapling/stapled with another amino acid residue comprising an olefin group to form a staple through the olefin group
  SITE 14: note = (S)-2-amino-3-(3,4-dichlorophenyl)propanoic acid
  SITE 15: note = L-glutamic acid, useful for stapling/stapled with another amino acid residue comprising a side chain amino group to form a staple through the 4-carboxyl group
  SITE 15: note = C-term amino
XPDXXDXXAFKXFXE

SEQ ID NO: 1276 - protein, 15 aa, synthetic construct
  SITE 1: note = N-term Acetic Acid
  SITE 1: note = (S)-2-amino-2-methyloct-7-enoic acid, useful for stapling/stapled with another amino acid residue comprising an olefin group to form a staple through the olefin group
  SITE 4: note = (S)-2-amino-3,3-diphenylpropanoic acid
  VARIANT 5: note = 2-amino-2-(pent-4-en-1-yl)hept-6-enoic acid, useful for stapling/stapled with another amino acid residue comprising an olefin group to form a staple through one of the two olefin groups and/or with another amino acid residue comprising an olefin group to form a staple through the other of the two olefin groups
  SITE 7: note = (S)-3-(2-amino-2-carboxyethyl)benzoic acid
  SITE 8: note = 2-amino-2-methylpropanoic acid
  SITE 11: note = L-lysine, useful for stapling/stapled with another amino acid residue comprising a side chain acid group to form a staple through the 6-amino group
  SITE 12: note (S)-3-amino-1-((pent-4-en-1-yloxy)carbonyl)pyrrolidine-3-ca rboxylic acid, useful for stapling/stapled with another amino acid residue comprising an olefin group to form a staple through the olefin group
  SITE 14: note = (S)-2-amino-3-(3,4-dichlorophenyl)propanoic acid
  SITE 15: note = L-glutamic acid, useful for stapling/stapled with another amino acid residue comprising a side chain amino group to form a staple through the 4-carboxyl group
  SITE 15: note = C-term amino
XPDXXDXXAFKXFXE

SEQ ID NO: 1277 - protein, 15 aa, synthetic construct
  SITE 1: note = N-term Acetic Acid
  SITE 1: note = (S)-2-amino-2-methyloct-7-enoic acid, useful for stapling/stapled with another amino acid residue comprising an olefin group to form a staple through the olefin group
  SITE 4: note = (S)-2-amino-3,3-diphenylpropanoic acid
  VARIANT 5: note = 2-amino-2-(pent-4-en-1-yl)hept-6-enoic acid, useful for stapling/stapled with another amino acid residue comprising an olefin group to form a staple through one of the two olefin groups and/or with another amino acid residue comprising an olefin group to form a staple through the other of the two olefin groups
  SITE 7: note = (S)-3-(2-amino-2-carboxyethyl)benzoic acid
  SITE 8: note = 2-amino-2-methylpropanoic acid
  SITE 11: note = L-lysine, useful for stapling/stapled with another amino acid residue comprising a side chain acid group to form a staple through the 6-amino group
  SITE 12: note (S)-3-amino-1-((but-3-en-1-yloxy)carbonyl)pyrrolidine-3-car boxylic acid, useful for stapling/stapled with another amino acid residue comprising an olefin group to form a staple through the olefin group
  SITE 14: note = (S)-2-amino-3-(3,4-dichlorophenyl)propanoic acid
  SITE 15: note = L-glutamic acid, useful for stapling/stapled with another amino acid residue comprising a side chain amino group to form a staple through the 4-carboxyl group
  SITE 15: note = C-term amino
XPDXXDXXAFKXFXE

SEQ ID NO: 1278 - protein, 14 aa, synthetic construct
  SITE 1: note = N-term Acetic Acid
  SITE 1: note = (R)-2-allylpyrrolidine-2-carboxylic acid, useful for stapling/stapled with another amino acid residue comprising an olefin group to form a staple through the olefin group
  VARIANT 4: note = 2-amino-2-(pent-4-en-1-yl)hept-6-enoic acid, useful for stapling/stapled with another amino acid residue comprising an olefin group to form a staple through one of the two olefin groups and/or with another amino acid residue comprising an olefin group to form a staple through the other of the two olefin groups
  SITE 6: note = (S)-3-(2-amino-2-carboxyethyl)benzoic acid
  SITE 10: note = L-lysine, useful for stapling/stapled with another amino acid residue comprising a side chain acid group to form a staple through the 6-amino group
  SITE 11: note (S)-3-amino-1-((pent-4-en-1-yloxy)carbonyl)pyrrolidine-3-ca rboxylic acid, useful for stapling/stapled with another amino acid residue comprising an olefin group to form a staple through the olefin group
  SITE 13: note = (S)-2-amino-3-(3,4-dichlorophenyl)propanoic acid
  SITE 14: note = L-glutamic acid, useful for stapling/stapled with another amino acid residue comprising a side chain amino group to form a staple through the 4-carboxyl group
  SITE 14: note = C-term amino
XDIXDXAAFKXFXE

SEQ ID NO: 1279 - protein, 14 aa, synthetic construct
  SITE 1: note = N-term Acetic Acid
  SITE 1: note = (R)-2-allylpyrrolidine-2-carboxylic acid, useful for stapling/stapled with another amino acid residue comprising an olefin group to form a staple through the olefin group
  VARIANT 4: note = 2-amino-2-(pent-4-en-1-yl)hept-6-enoic acid, useful for stapling/stapled with another amino acid residue comprising an olefin group to form a staple through one of the two olefin groups and/or with another amino acid residue comprising an olefin group to form a staple through the other of the two olefin groups
  SITE 6: note = (S)-3-(2-amino-2-carboxyethyl)benzoic acid
  SITE 10: note = L-lysine, useful for stapling/stapled with another amino acid residue comprising a side chain acid group to form a staple through the 6-amino group
  SITE 11: note (S)-3-amino-1-((but-3-en-1-yloxy)carbonyl)pyrrolidine-3-car boxylic acid, useful for stapling/stapled with another amino acid residue comprising an olefin group to form a staple through the olefin group
  SITE 13: note = (S)-2-amino-3-(3,4-dichlorophenyl)propanoic acid
  SITE 14: note = L-glutamic acid, useful for stapling/stapled with another amino acid residue comprising a side chain amino group to form a staple through the 4-carboxyl group
  SITE 14: note = C-term amino
XDIXDXAAFKXFXE

SEQ ID NO: 1280 - protein, 14 aa, synthetic construct
  SITE 1: note = N-term Acetic Acid
  SITE 1: note = (R)-2-allylpyrrolidine-2-carboxylic acid, useful for stapling/stapled with another amino acid residue comprising an olefin group to form a staple through the olefin group
  VARIANT 4: note = 2-amino-2-(pent-4-en-1-yl)hept-6-enoic acid, useful for stapling/stapled with another amino acid residue comprising an olefin group to form a staple through one of the two olefin groups and/or with another amino acid residue comprising an olefin group to form a staple through the other of the two olefin groups
  SITE 6: note = (S)-3-(2-amino-2-carboxyethyl)benzoic acid
  SITE 10: note = L-lysine, useful for stapling/stapled with another amino acid residue comprising a side chain acid group to form a staple through the 6-amino group
  SITE 11: note (S)-3-amino-1-((pent-4-en-1-yloxy)carbonyl)pyrrolidine-3-ca rboxylic acid, useful for stapling/stapled with another amino acid residue comprising an olefin group to form a staple through the olefin group
  SITE 13: note = (S)-2-amino-3-(3,4-dichlorophenyl)propanoic acid
  SITE 14: note = L-glutamic acid, useful for stapling/stapled with another amino acid residue comprising a side chain amino group to form a staple through the 4-carboxyl group
  SITE 14: note = C-term amino
XDLXDXAAFKXFXE

SEQ ID NO: 1281 - protein, 14 aa, synthetic construct
  SITE 1: note = N-term Acetic Acid
  SITE 1: note = (R)-2-allylpyrrolidine-2-carboxylic acid, useful for stapling/stapled with another amino acid residue comprising an olefin group to form a staple through the olefin group
  VARIANT 4: note = 2-amino-2-(pent-4-en-1-yl)hept-6-enoic acid, useful for stapling/stapled with another amino acid residue comprising an olefin group to form a staple through one of the two olefin groups and/or with another amino acid residue comprising an olefin group to form a staple through the other of the two olefin groups
  SITE 6: note = (S)-3-(2-amino-2-carboxyethyl)benzoic acid
  SITE 10: note = L-lysine, useful for stapling/stapled with another amino acid residue comprising a side chain acid group to form a staple through the 6-amino group
  SITE 11: note (S)-3-amino-1-((but-3-en-1-yloxy)carbonyl)pyrrolidine-3-car boxylic acid, useful for stapling/stapled with another amino acid residue comprising an olefin group to form a staple through the olefin group
  SITE 13: note = (S)-2-amino-3-(3,4-dichlorophenyl)propanoic acid
  SITE 14: note = L-glutamic acid, useful for stapling/stapled with another amino acid residue comprising a side chain amino group to form a staple through the 4-carboxyl group
  SITE 14: note = C-term amino
XDLXDXAAFKXFXE

SEQ ID NO: 1282 - protein, 15 aa, synthetic construct
  SITE 1: note = N-term Acetic Acid
  SITE 1: note = (R)-2-allylpyrrolidine-2-carboxylic acid, useful for stapling/stapled with another amino acid residue comprising an olefin group to form a staple through the olefin group
  SITE 3: note = (S)-2-amino-3,3-diphenylpropanoic acid
  VARIANT 4: note = 2-amino-2-(pent-4-en-1-yl)hept-6-enoic acid, useful for stapling/stapled with another amino acid residue comprising an olefin group to form a staple through one of the two olefin groups and/or with another amino acid residue comprising an olefin group to form a staple through the other of the two olefin groups
  SITE 6: note = (S)-3-(2-amino-2-carboxyethyl)benzoic acid
  SITE 10: note = L-lysine, useful for stapling/stapled with another amino acid residue comprising a side chain acid group to form a staple through the 6-amino group
  SITE 11: note (S)-3-amino-1-((pent-4-en-1-yloxy)carbonyl)pyrrolidine-3-ca rboxylic acid, useful for stapling/stapled with another amino acid residue comprising an olefin group to form a staple through the olefin group
  SITE 12: note = (S)-2-amino-3-(thiophen-3-yl)propanoic acid
  SITE 13: note = (S)-2-amino-3-(3,4-dichlorophenyl)propanoic acid
  SITE 14: note = L-glutamic acid, useful for stapling/stapled with another amino acid residue comprising a side chain amino group to form a staple through the 4-carboxyl group
  SITE 15: note = (S)-32-amino-26-oxo-2,5,8,11,14,17,20,23-octaoxa-27- azatritriacontan-33-oic acid
  SITE 15: note = C-term amino
XDXXDXAAFKXXXEX

SEQ ID NO: 1283 - protein, 15 aa, synthetic construct
  SITE 1: note = N-term Acetic Acid
  SITE 1: note = (R)-2-allylpyrrolidine-2-carboxylic acid, useful for stapling/stapled with another amino acid residue comprising an olefin group to form a staple through the olefin group
  SITE 3: note = (S)-2-amino-3,3-diphenylpropanoic acid
  VARIANT 4: note = 2-amino-2-(pent-4-en-1-yl)hept-6-enoic acid, useful for stapling/stapled with another amino acid residue comprising an olefin group to form a staple through one of the two olefin groups and/or with another amino acid residue comprising an olefin group to form a staple through the other of the two olefin groups
  SITE 6: note = (S)-3-(2-amino-2-carboxyethyl)benzoic acid
  SITE 10: note = L-lysine, useful for stapling/stapled with another amino acid residue comprising a side chain acid group to form a staple through the 6-amino group
  SITE 11: note (S)-3-amino-1-((pent-4-en-1-yloxy)carbonyl)pyrrolidine-3-ca rboxylic acid, useful for stapling/stapled with another amino acid residue comprising an olefin group to form a staple through the olefin group
  SITE 12: note = (S)-2-amino-3-(thiophen-3-yl)propanoic acid
  SITE 13: note = (S)-2-amino-3-(3,4-dichlorophenyl)propanoic acid
  SITE 14: note = L-glutamic acid, useful for stapling/stapled with another amino acid residue comprising a side chain amino group to form a staple through the 4-carboxyl group
  SITE 15: note (S)-119-amino-113-oxo-2,5,8,11,14,17,20,23,26,29,32,35,38,4 1,44, 47,50,53,56,59,62,65,68,71,74,77,80,83,86,89,92,95,98,101,1 04, 107,110-heptatriacontaoxa-114-azaicosahectan-120-oic acid
  SITE 15: note = C-term amino
XDXXDXAAFKXXXEX

SEQ ID NO: 1284 - protein, 17 aa, synthetic construct
  SITE 1: note = N-term Acetic Acid
  SITE 1: note = (R)-2-allylpyrrolidine-2-carboxylic acid, useful for stapling/stapled with another amino acid residue comprising an olefin group to form a staple through the olefin group
  SITE 3: note = (S)-2-amino-3,3-diphenylpropanoic acid
  VARIANT 4: note = 2-amino-2-(pent-4-en-1-yl)hept-6-enoic acid, useful for stapling/stapled with another amino acid residue comprising an olefin group to form a staple through one of the two olefin groups and/or with another amino acid residue comprising an olefin group to form a staple through the other of the two olefin groups
  SITE 6: note = (S)-3-(2-amino-2-carboxyethyl)benzoic acid
  SITE 10: note = L-lysine, useful for stapling/stapled with another amino acid residue comprising a side chain acid group to form a staple through the 6-amino group
  SITE 11: note (S)-3-amino-1-((pent-4-en-1-yloxy)carbonyl)pyrrolidine-3-ca rboxylic acid, useful for stapling/stapled with another amino acid residue comprising an olefin group to form a staple through the olefin group
  SITE 12: note = (S)-2-amino-3-(thiophen-3-yl)propanoic acid
  SITE 13: note = (S)-2-amino-3-(3,4-dichlorophenyl)propanoic acid
  SITE 14: note = L-glutamic acid, useful for stapling/stapled with another amino acid residue comprising a side chain amino group to form a staple through the 4-carboxyl group
  SITE 17: note = (S)-32-amino-26-oxo-2,5,8,11,14,17,20,23-octaoxa-27- azatritriacontan-33-oic acid
  SITE 17: note = C-term amino
XDXXDXAAFKXXXEAAX

SEQ ID NO: 1285 - protein, 17 aa, synthetic construct
  SITE 1: note = N-term Acetic Acid
  SITE 1: note = (R)-2-allylpyrrolidine-2-carboxylic acid, useful for stapling/stapled with another amino acid residue comprising an olefin group to form a staple through the olefin group
  SITE 3: note = (S)-2-amino-3,3-diphenylpropanoic acid
  VARIANT 4: note = 2-amino-2-(pent-4-en-1-yl)hept-6-enoic acid, useful for stapling/stapled with another amino acid residue comprising an olefin group to form a staple through one of the two olefin groups and/or with another amino acid residue comprising an olefin group to form a staple through the other of the two olefin groups
  SITE 6: note = (S)-3-(2-amino-2-carboxyethyl)benzoic acid
  SITE 10: note = L-lysine, useful for stapling/stapled with another amino acid residue comprising a side chain acid group to form a staple through the 6-amino group
  SITE 11: note (S)-3-amino-1-((pent-4-en-1-yloxy)carbonyl)pyrrolidine-3-ca rboxylic acid, useful for stapling/stapled with another amino acid residue comprising an olefin group to form a staple through the olefin group
  SITE 12: note = (S)-2-amino-3-(thiophen-3-yl)propanoic acid
  SITE 13: note = (S)-2-amino-3-(3,4-dichlorophenyl)propanoic acid
  SITE 14: note = L-glutamic acid, useful for stapling/stapled with another amino acid residue comprising a side chain amino group to form a staple through the 4-carboxyl group
  SITE 17: note (S)-119-amino-113-oxo-2,5,8,11,14,17,20,23,26,29,32,35,38,4 1, 44,47,50,53,56,59,62,65,68,71,74,77,80,83,86,89,92,95,98,10 1, 104,107,110-heptatriacontaoxa-114-azaicosahectan-120-oic acid
  SITE 17: note = C-term amino
XDXXDXAAFKXXXEAAX

SEQ ID NO: 1286 - protein, 18 aa, synthetic construct
  SITE 1: note = N-term Acetic Acid
  SITE 1: note = (R)-2-allylpyrrolidine-2-carboxylic acid, useful for stapling/stapled with another amino acid residue comprising an olefin group to form a staple through the olefin group
  SITE 3: note = (S)-2-amino-3,3-diphenylpropanoic acid
  VARIANT 4: note = 2-amino-2-(pent-4-en-1-yl)hept-6-enoic acid, useful for stapling/stapled with another amino acid residue comprising an olefin group to form a staple through one of the two olefin groups and/or with another amino acid residue comprising an olefin group to form a staple through the other of the two olefin groups
  SITE 6: note = (S)-3-(2-amino-2-carboxyethyl)benzoic acid
  SITE 10: note = L-lysine, useful for stapling/stapled with another amino acid residue comprising a side chain acid group to form a staple through the 6-amino group
  SITE 11: note (S)-3-amino-1-((pent-4-en-1-yloxy)carbonyl)pyrrolidine-3-ca rboxylic acid, useful for stapling/stapled with another amino acid residue comprising an olefin group to form a staple through the olefin group
  SITE 12: note = (S)-2-amino-3-(thiophen-3-yl)propanoic acid
  SITE 13: note = (S)-2-amino-3-(3,4-dichlorophenyl)propanoic acid
  SITE 14: note = L-glutamic acid, useful for stapling/stapled with another amino acid residue comprising a side chain amino group to form a staple through the 4-carboxyl group
  SITE 18: note = (S)-32-amino-26-oxo-2,5,8,11,14,17,20,23-octaoxa-27- azatritriacontan-33-oic acid
XDXXDXAAFKXXXEAAAX

SEQ ID NO: 1287 - protein, 18 aa, synthetic construct
  SITE 1: note = N-term Acetic Acid
  SITE 1: note = (R)-2-allylpyrrolidine-2-carboxylic acid, useful for stapling/stapled with another amino acid residue comprising an olefin group to form a staple through the olefin group
  SITE 3: note = (S)-2-amino-3,3-diphenylpropanoic acid
  VARIANT 4: note = 2-amino-2-(pent-4-en-1-yl)hept-6-enoic acid, useful for stapling/stapled with another amino acid residue comprising an olefin group to form a staple through one of the two olefin groups and/or with another amino acid residue comprising an olefin group to form a staple through the other of the two olefin groups
  SITE 6: note = (S)-3-(2-amino-2-carboxyethyl)benzoic acid
  SITE 10: note = L-lysine, useful for stapling/stapled with another amino acid residue comprising a side chain acid group to form a staple through the 6-amino group
  SITE 11: note (S)-3-amino-1-((pent-4-en-1-yloxy)carbonyl)pyrrolidine-3-ca rboxylic acid, useful for stapling/stapled with another amino acid residue comprising an olefin group to form a staple through the olefin group
  SITE 12: note = (S)-2-amino-3-(thiophen-3-yl)propanoic acid
  SITE 13: note = (S)-2-amino-3-(3,4-dichlorophenyl)propanoic acid
  SITE 14: note = L-glutamic acid, useful for stapling/stapled with another amino acid residue comprising a side chain amino group to form a staple through the 4-carboxyl group
  SITE 18: note (S)-119-amino-113-oxo-2,5,8,11,14,17,20,23,26,29,32,35,38,4 1, 44,47,50,53,56,59,62,65,68,71,74,77,80,83,86,89,92,95,98,10 1, 104,107,110-heptatriacontaoxa-114-azaicosahectan-120-oic acid
XDXXDXAAFKXXXEAAAX

SEQ ID NO: 1288 - protein, 18 aa, synthetic construct
  SITE 1: note = N-term Acetic Acid
  SITE 1: note = (R)-2-allylpyrrolidine-2-carboxylic acid, useful for stapling/stapled with another amino acid residue comprising an olefin group to form a staple through the olefin group
  SITE 3: note = (S)-2-amino-4,4-dimethylpentanoic acid
  VARIANT 4: note = 2-amino-2-(pent-4-en-1-yl)hept-6-enoic acid, useful for stapling/stapled with another amino acid residue comprising an olefin group to form a staple through one of the two olefin groups and/or with another amino acid residue comprising an olefin group to form a staple through the other of the two olefin groups
  SITE 6: note = (S)-3-(2-amino-2-carboxyethyl)benzoic acid
  SITE 7: note = 2-amino-2-methylpropanoic acid
  SITE 10: note = L-lysine, useful for stapling/stapled with another amino acid residue comprising a side chain acid group to form a staple through the 6-amino group
  SITE 11: note (S)-3-amino-1-((pent-4-en-1-yloxy)carbonyl)pyrrolidine-3-ca rboxylic acid, useful for stapling/stapled with another amino acid residue comprising an olefin group to form a staple through the olefin group
  SITE 12: note = (S)-2-amino-3-(thiophen-3-yl)propanoic acid
  SITE 13: note = (S)-2-amino-3-(3,4-dichlorophenyl)propanoic acid
  SITE 14: note = L-glutamic acid, useful for stapling/stapled with another amino acid residue comprising a side chain amino group to form a staple through the 4-carboxyl group
  SITE 18: note = (S)-32-amino-26-oxo-2,5,8,11,14,17,20,23-octaoxa-27- azatritriacontan-33-oic acid
XDXXDXXAFKXXXEAAAX

SEQ ID NO: 1289 - protein, 18 aa, synthetic construct
  SITE 1: note = N-term Acetic Acid
  SITE 1: note = (R)-2-allylpyrrolidine-2-carboxylic acid, useful for stapling/stapled with another amino acid residue comprising an olefin group to form a staple through the olefin group
  SITE 3: note = (S)-2-amino-4,4-dimethylpentanoic acid
  VARIANT 4: note = 2-amino-2-(pent-4-en-1-yl)hept-6-enoic acid, useful for stapling/stapled with another amino acid residue comprising an olefin group to form a staple through one of the two olefin groups and/or with another amino acid residue comprising an olefin group to form a staple through the other of the two olefin groups
  SITE 6: note = (S)-3-(2-amino-2-carboxyethyl)benzoic acid
  SITE 7: note = 2-amino-2-methylpropanoic acid
  SITE 10: note = L-lysine, useful for stapling/stapled with another amino acid residue comprising a side chain acid group to form a staple through the 6-amino group
  SITE 11: note (S)-3-amino-1-((pent-4-en-1-yloxy)carbonyl)pyrrolidine-3-ca rboxylic acid, useful for stapling/stapled with another amino acid residue comprising an olefin group to form a staple through the olefin group
  SITE 12: note = (S)-2-amino-3-(thiophen-3-yl)propanoic acid
  SITE 13: note = (S)-2-amino-3-(3,4-dichlorophenyl)propanoic acid
  SITE 14: note = L-glutamic acid, useful for stapling/stapled with another amino acid residue comprising a side chain amino group to form a staple through the 4-carboxyl group
  SITE 18: note (S)-119-amino-113-oxo-2,5,8,11,14,17,20,23,26,29,32,35,38,4 1, 44,47,50,53,56,59,62,65,68,71,74,77,80,83,86,89,92,95,98,10 1, 104,107,110-heptatriacontaoxa-114-azaicosahectan-120-oic acid
XDXXDXXAFKXXXEAAAX

SEQ ID NO: 1290 - protein, 14 aa, synthetic construct
  SITE 1: note = N-term Acetic Acid
  SITE 1: note = (R)-2-allylpyrrolidine-2-carboxylic acid, useful for stapling/stapled with another amino acid residue comprising an olefin group to form a staple through the olefin group
  SITE 3: note = (S)-2-amino-4,4-dimethylpentanoic acid
  VARIANT 4: note = 2-amino-2-(pent-4-en-1-yl)hept-6-enoic acid, useful for stapling/stapled with another amino acid residue comprising an olefin group to form a staple through one of the two olefin groups and/or with another amino acid residue comprising an olefin group to form a staple through the other of the two olefin groups
  SITE 6: note = (S)-3-(2-amino-2-carboxyethyl)benzoic acid
  SITE 7: note = 2-amino-2-methylpropanoic acid
  SITE 10: note = L-lysine, useful for stapling/stapled with another amino acid residue comprising a side chain acid group to form a staple through the 6-amino group
  SITE 11: note (S)-3-amino-1-((pent-4-en-1-yloxy)carbonyl)pyrrolidine-3-ca rboxylic acid, useful for stapling/stapled with another amino acid residue comprising an olefin group to form a staple through the olefin group
  SITE 12: note = (S)-2-amino-3-(thiophen-3-yl)propanoic acid
  SITE 13: note = (S)-2-amino-3-(benzo[b]thiophen-3-yl)propanoic acid
  SITE 14: note = L-glutamic acid, useful for stapling/stapled with another amino acid residue comprising a side chain amino group to form a staple through the 4-carboxyl group
  SITE 14: note = C-term OH
XDXXDXXAFKXXXE

SEQ ID NO: 1291 - protein, 14 aa, synthetic construct
  SITE 1: note = N-term butyric acid
  SITE 1: note = (R)-2-allylpyrrolidine-2-carboxylic acid, useful for stapling/stapled with another amino acid residue comprising an olefin group to form a staple through the olefin group
  SITE 3: note = (S)-2-amino-3,3-diphenylpropanoic acid
  VARIANT 4: note = 2-amino-2-(pent-4-en-1-yl)hept-6-enoic acid, useful for stapling/stapled with another amino acid residue comprising an olefin group to form a staple through one of the two olefin groups and/or with another amino acid residue comprising an olefin group to form a staple through the other of the two olefin groups
  SITE 6: note = (S)-3-(2-amino-2-carboxyethyl)benzoic acid
  SITE 7: note = 1-aminocyclopentane-1-carboxylic acid
  SITE 10: note = L-lysine, useful for stapling/stapled with another amino acid residue comprising a side chain acid group to form a staple through the 6-amino group
  SITE 11: note (S)-3-amino-1-((pent-4-en-1-yloxy)carbonyl)pyrrolidine-3-ca rboxylic acid, useful for stapling/stapled with another amino acid residue comprising an olefin group to form a staple through the olefin group
  SITE 12: note = (S)-2-amino-3-(thiophen-3-yl)propanoic acid
  SITE 13: note = (S)-2-amino-3-(3,4-dichlorophenyl)propanoic acid
  SITE 14: note = L-glutamic acid, useful for stapling/stapled with another amino acid residue comprising a side chain amino group to form a staple through the 4-carboxyl group
  SITE 14: note = C-term amino
XDXXDXXAFKXXXE

SEQ ID NO: 1292 - protein, 14 aa, synthetic construct
  SITE 1: note = N-term 3-methylbutanoic acid
  SITE 1: note = (R)-2-allylpyrrolidine-2-carboxylic acid, useful for stapling/stapled with another amino acid residue comprising an olefin group to form a staple through the olefin group
  SITE 3: note = (S)-2-amino-3,3-diphenylpropanoic acid
  VARIANT 4: note = 2-amino-2-(pent-4-en-1-yl)hept-6-enoic acid, useful for stapling/stapled with another amino acid residue comprising an olefin group to form a staple through one of the two olefin groups and/or with another amino acid residue comprising an olefin group to form a staple through the other of the two olefin groups
  SITE 6: note = (S)-3-(2-amino-2-carboxyethyl)benzoic acid
  SITE 7: note = 1-aminocyclopentane-1-carboxylic acid
  SITE 10: note = L-lysine, useful for stapling/stapled with another amino acid residue comprising a side chain acid group to form a staple through the 6-amino group
  SITE 11: note (S)-3-amino-1-((pent-4-en-1-yloxy)carbonyl)pyrrolidine-3-ca rboxylic acid, useful for stapling/stapled with another amino acid residue comprising an olefin group to form a staple through the olefin group
  SITE 12: note = (S)-2-amino-3-(thiophen-3-yl)propanoic acid
  SITE 13: note = (S)-2-amino-3-(3,4-dichlorophenyl)propanoic acid
  SITE 14: note = L-glutamic acid, useful for stapling/stapled with another amino acid residue comprising a side chain amino group to form a staple through the 4-carboxyl group
  SITE 14: note = C-term amino
XDXXDXXAFKXXXE

SEQ ID NO: 1293 - protein, 14 aa, synthetic construct
  SITE 1: note = N-term cyclopropanecarboxylic acid
  SITE 1: note = (R)-2-allylpyrrolidine-2-carboxylic acid, useful for stapling/stapled with another amino acid residue comprising an olefin group to form a staple through the olefin group
  SITE 3: note = (S)-2-amino-3,3-diphenylpropanoic acid
  VARIANT 4: note = 2-amino-2-(pent-4-en-1-yl)hept-6-enoic acid, useful for stapling/stapled with another amino acid residue comprising an olefin group to form a staple through one of the two olefin groups and/or with another amino acid residue comprising an olefin group to form a staple through the other of the two olefin groups
  SITE 6: note = (S)-3-(2-amino-2-carboxyethyl)benzoic acid
  SITE 7: note = 1-aminocyclopentane-1-carboxylic acid
  SITE 10: note = L-lysine, useful for stapling/stapled with another amino acid residue comprising a side chain acid group to form a staple through the 6-amino group
  SITE 11: note (S)-3-amino-1-((pent-4-en-1-yloxy)carbonyl)pyrrolidine-3-ca rboxylic acid, useful for stapling/stapled with another amino acid residue comprising an olefin group to form a staple through the olefin group
  SITE 12: note = (S)-2-amino-3-(thiophen-3-yl)propanoic acid
  SITE 13: note = (S)-2-amino-3-(3,4-dichlorophenyl)propanoic acid
  SITE 14: note = L-glutamic acid, useful for stapling/stapled with another amino acid residue comprising a side chain amino group to form a staple through the 4-carboxyl group
  SITE 14: note = C-term amino
XDXXDXXAFKXXXE

SEQ ID NO: 1294 - protein, 14 aa, synthetic construct
  SITE 1: note = N-term cyclobutanecarboxylic acid
  SITE 1: note = (R)-2-allylpyrrolidine-2-carboxylic acid, useful for stapling/stapled with another amino acid residue comprising an olefin group to form a staple through the olefin group
  SITE 3: note = (S)-2-amino-3,3-diphenylpropanoic acid
  VARIANT 4: note = 2-amino-2-(pent-4-en-1-yl)hept-6-enoic acid, useful for stapling/stapled with another amino acid residue comprising an olefin group to form a staple through one of the two olefin groups and/or with another amino acid residue comprising an olefin group to form a staple through the other of the two olefin groups
  SITE 6: note = (S)-3-(2-amino-2-carboxyethyl)benzoic acid
  SITE 7: note = 1-aminocyclopentane-1-carboxylic acid
  SITE 10: note = L-lysine, useful for stapling/stapled with another amino acid residue comprising a side chain acid group to form a staple through the 6-amino group
  SITE 11: note (S)-3-amino-1-((pent-4-en-1-yloxy)carbonyl)pyrrolidine-3-ca rboxylic acid, useful for stapling/stapled with another amino acid residue comprising an olefin group to form a staple through the olefin group
  SITE 12: note = (S)-2-amino-3-(thiophen-3-yl)propanoic acid
  SITE 13: note = (S)-2-amino-3-(3,4-dichlorophenyl)propanoic acid
  SITE 14: note = L-glutamic acid, useful for stapling/stapled with another amino acid residue comprising a side chain amino group to form a staple through the 4-carboxyl group
  SITE 14: note = C-term amino
XDXXDXXAFKXXXE

SEQ ID NO: 1295 - protein, 14 aa, synthetic construct
  SITE 1: note = N-term cyclopentanecarboxylic acid
  SITE 1: note = (R)-2-allylpyrrolidine-2-carboxylic acid, useful for stapling/stapled with another amino acid residue comprising an olefin group to form a staple through the olefin group
  SITE 3: note = (S)-2-amino-3,3-diphenylpropanoic acid
  VARIANT 4: note = 2-amino-2-(pent-4-en-1-yl)hept-6-enoic acid, useful for stapling/stapled with another amino acid residue comprising an olefin group to form a staple through one of the two olefin groups and/or with another amino acid residue comprising an olefin group to form a staple through the other of the two olefin groups
  SITE 6: note = (S)-3-(2-amino-2-carboxyethyl)benzoic acid
  SITE 7: note = 1-aminocyclopentane-1-carboxylic acid
  SITE 10: note = L-lysine, useful for stapling/stapled with another amino acid residue comprising a side chain acid group to form a staple through the 6-amino group
  SITE 11: note (S)-3-amino-1-((pent-4-en-1-yloxy)carbonyl)pyrrolidine-3-ca rboxylic acid, useful for stapling/stapled with another amino acid residue comprising an olefin group to form a staple through the olefin group
  SITE 12: note = (S)-2-amino-3-(thiophen-3-yl)propanoic acid
  SITE 13: note = (S)-2-amino-3-(3,4-dichlorophenyl)propanoic acid
  SITE 14: note = L-glutamic acid, useful for stapling/stapled with another amino acid residue comprising a side chain amino group to form a staple through the 4-carboxyl group
  SITE 14: note = C-term amino
XDXXDXXAFKXXXE

SEQ ID NO: 1296 - protein, 14 aa, synthetic construct
  SITE 1: note = N-term 2-phenylacetic acid
  SITE 1: note = (R)-2-allylpyrrolidine-2-carboxylic acid, useful for stapling/stapled with another amino acid residue comprising an olefin group to form a staple through the olefin group
  SITE 3: note = (S)-2-amino-3,3-diphenylpropanoic acid
  VARIANT 4: note = 2-amino-2-(pent-4-en-1-yl)hept-6-enoic acid, useful for stapling/stapled with another amino acid residue comprising an olefin group to form a staple through one of the two olefin groups and/or with another amino acid residue comprising an olefin group to form a staple through the other of the two olefin groups
  SITE 6: note = (S)-3-(2-amino-2-carboxyethyl)benzoic acid
  SITE 7: note = 1-aminocyclopentane-1-carboxylic acid
  SITE 10: note = L-lysine, useful for stapling/stapled with another amino acid residue comprising a side chain acid group to form a staple through the 6-amino group
  SITE 11: note (S)-3-amino-1-((pent-4-en-1-yloxy)carbonyl)pyrrolidine-3-ca rboxylic acid, useful for stapling/stapled with another amino acid residue comprising an olefin group to form a staple through the olefin group
  SITE 12: note = (S)-2-amino-3-(thiophen-3-yl)propanoic acid
  SITE 13: note = (S)-2-amino-3-(3,4-dichlorophenyl)propanoic acid
  SITE 14: note = L-glutamic acid, useful for stapling/stapled with another amino acid residue comprising a side chain amino group to form a staple through the 4-carboxyl group
  SITE 14: note = C-term amino
XDXXDXXAFKXXXE

SEQ ID NO: 1297 - protein, 14 aa, synthetic construct
  SITE 1: note = N-term 2,2,2-trifluoroacetic acid
  SITE 1: note = (R)-2-allylpyrrolidine-2-carboxylic acid, useful for stapling/stapled with another amino acid residue comprising an olefin group to form a staple through the olefin group
  SITE 3: note = (S)-2-amino-3,3-diphenylpropanoic acid
  VARIANT 4: note = 2-amino-2-(pent-4-en-1-yl)hept-6-enoic acid, useful for stapling/stapled with another amino acid residue comprising an olefin group to form a staple through one of the two olefin groups and/or with another amino acid residue comprising an olefin group to form a staple through the other of the two olefin groups
  SITE 6: note = (S)-3-(2-amino-2-carboxyethyl)benzoic acid
  SITE 7: note = 1-aminocyclopentane-1-carboxylic acid
  SITE 10: note = L-lysine, useful for stapling/stapled with another amino acid residue comprising a side chain acid group to form a staple through the 6-amino group
  SITE 11: note (S)-3-amino-1-((pent-4-en-1-yloxy)carbonyl)pyrrolidine-3-ca rboxylic acid, useful for stapling/stapled with another amino acid residue comprising an olefin group to form a staple through the olefin group
  SITE 12: note = (S)-2-amino-3-(thiophen-3-yl)propanoic acid
  SITE 13: note = (S)-2-amino-3-(3,4-dichlorophenyl)propanoic acid
  SITE 14: note = L-glutamic acid, useful for stapling/stapled with another amino acid residue comprising a side chain amino group to form a staple through the 4-carboxyl group
  SITE 14: note = C-term amino
XDXXDXXAFKXXXE

SEQ ID NO: 1298 - protein, 14 aa, synthetic construct
  SITE 1: note = N-term 2-(quinolin-6-yl)acetic acid
  SITE 1: note = (R)-2-allylpyrrolidine-2-carboxylic acid, useful for stapling/stapled with another amino acid residue comprising an olefin group to form a staple through the olefin group
  SITE 3: note = (S)-2-amino-3,3-diphenylpropanoic acid
  VARIANT 4: note = 2-amino-2-(pent-4-en-1-yl)hept-6-enoic acid, useful for stapling/stapled with another amino acid residue comprising an olefin group to form a staple through one of the two olefin groups and/or with another amino acid residue comprising an olefin group to form a staple through the other of the two olefin groups
  SITE 6: note = (S)-3-(2-amino-2-carboxyethyl)benzoic acid
  SITE 7: note = 1-aminocyclopentane-1-carboxylic acid
  SITE 10: note = L-lysine, useful for stapling/stapled with another amino acid residue comprising a side chain acid group to form a staple through the 6-amino group
  SITE 11: note (S)-3-amino-1-((pent-4-en-1-yloxy)carbonyl)pyrrolidine-3-ca rboxylic acid, useful for stapling/stapled with another amino acid residue comprising an olefin group to form a staple through the olefin group
  SITE 12: note = (S)-2-amino-3-(thiophen-3-yl)propanoic acid
  SITE 13: note = (S)-2-amino-3-(3,4-dichlorophenyl)propanoic acid
  SITE 14: note = L-glutamic acid, useful for stapling/stapled with another amino acid residue comprising a side chain amino group to form a staple through the 4-carboxyl group
  SITE 14: note = C-term amino
XDXXDXXAFKXXXE

SEQ ID NO: 1299 - protein, 14 aa, synthetic construct
  SITE 1: note = N-term 2-(1H-1,2,4-triazol-1-yl)acetic acid
  SITE 1: note = (R)-2-allylpyrrolidine-2-carboxylic acid, useful for stapling/stapled with another amino acid residue comprising an olefin group to form a staple through the olefin group
  SITE 3: note = (S)-2-amino-3,3-diphenylpropanoic acid
  VARIANT 4: note = 2-amino-2-(pent-4-en-1-yl)hept-6-enoic acid, useful for stapling/stapled with another amino acid residue comprising an olefin group to form a staple through one of the two olefin groups and/or with another amino acid residue comprising an olefin group to form a staple through the other of the two olefin groups
  SITE 6: note = (S)-3-(2-amino-2-carboxyethyl)benzoic acid
  SITE 7: note = 1-aminocyclopentane-1-carboxylic acid
  SITE 10: note = L-lysine, useful for stapling/stapled with another amino acid residue comprising a side chain acid group to form a staple through the 6-amino group
  SITE 11: note (S)-3-amino-1-((pent-4-en-1-yloxy)carbonyl)pyrrolidine-3-ca rboxylic acid, useful for stapling/stapled with another amino acid residue comprising an olefin group to form a staple through the olefin group
  SITE 12: note = (S)-2-amino-3-(thiophen-3-yl)propanoic acid
  SITE 13: note = (S)-2-amino-3-(3,4-dichlorophenyl)propanoic acid
  SITE 14: note = L-glutamic acid, useful for stapling/stapled with another amino acid residue comprising a side chain amino group to form a staple through the 4-carboxyl group
  SITE 14: note = C-term amino
XDXXDXXAFKXXXE

SEQ ID NO: 1300 - protein, 14 aa, synthetic construct
  SITE 1: note = N-term 2-(pyrimidin-5-yl)acetic acid
  SITE 1: note = (R)-2-allylpyrrolidine-2-carboxylic acid, useful for stapling/stapled with another amino acid residue comprising an olefin group to form a staple through the olefin group
  SITE 3: note = (S)-2-amino-3,3-diphenylpropanoic acid
  VARIANT 4: note = 2-amino-2-(pent-4-en-1-yl)hept-6-enoic acid, useful for stapling/stapled with another amino acid residue comprising an olefin group to form a staple through one of the two olefin groups and/or with another amino acid residue comprising an olefin group to form a staple through the other of the two olefin groups
  SITE 6: note = (S)-3-(2-amino-2-carboxyethyl)benzoic acid
  SITE 7: note = 1-aminocyclopentane-1-carboxylic acid
  SITE 10: note = L-lysine, useful for stapling/stapled with another amino acid residue comprising a side chain acid group to form a staple through the 6-amino group
  SITE 11: note (S)-3-amino-1-((pent-4-en-1-yloxy)carbonyl)pyrrolidine-3-ca rboxylic acid, useful for stapling/stapled with another amino acid residue comprising an olefin group to form a staple through the olefin group
  SITE 12: note = (S)-2-amino-3-(thiophen-3-yl)propanoic acid
  SITE 13: note = (S)-2-amino-3-(3,4-dichlorophenyl)propanoic acid
  SITE 14: note = L-glutamic acid, useful for stapling/stapled with another amino acid residue comprising a side chain amino group to form a staple through the 4-carboxyl group
  SITE 14: note = C-term amino
XDXXDXXAFKXXXE

SEQ ID NO: 1301 - protein, 14 aa, synthetic construct
  SITE 1: note = N-term 1-(pyridin-2-yl)cyclopropane-1-carboxylic acid
  SITE 1: note = (R)-2-allylpyrrolidine-2-carboxylic acid, useful for stapling/stapled with another amino acid residue comprising an olefin group to form a staple through the olefin group
  SITE 3: note = (S)-2-amino-3,3-diphenylpropanoic acid
  VARIANT 4: note = 2-amino-2-(pent-4-en-1-yl)hept-6-enoic acid, useful for stapling/stapled with another amino acid residue comprising an olefin group to form a staple through one of the two olefin groups and/or with another amino acid residue comprising an olefin group to form a staple through the other of the two olefin groups
  SITE 6: note = (S)-3-(2-amino-2-carboxyethyl)benzoic acid
  SITE 7: note = 1-aminocyclopentane-1-carboxylic acid
  SITE 10: note = L-lysine, useful for stapling/stapled with another amino acid residue comprising a side chain acid group to form a staple through the 6-amino group
  SITE 11: note (S)-3-amino-1-((pent-4-en-1-yloxy)carbonyl)pyrrolidine-3-ca rboxylic acid, useful for stapling/stapled with another amino acid residue comprising an olefin group to form a staple through the olefin group
  SITE 12: note = (S)-2-amino-3-(thiophen-3-yl)propanoic acid
  SITE 13: note = (S)-2-amino-3-(3,4-dichlorophenyl)propanoic acid
  SITE 14: note = L-glutamic acid, useful for stapling/stapled with another amino acid residue comprising a side chain amino group to form a staple through the 4-carboxyl group
  SITE 14: note = C-term amino
XDXXDXXAFKXXXE

SEQ ID NO: 1302 - protein, 14 aa, synthetic construct
  SITE 1: note = N-term 4-(pyridin-2-yl)butanoic acid
  SITE 1: note = (R)-2-allylpyrrolidine-2-carboxylic acid, useful for stapling/stapled with another amino acid residue comprising an olefin group to form a staple through the olefin group
  SITE 3: note = (S)-2-amino-3,3-diphenylpropanoic acid
  VARIANT 4: note = 2-amino-2-(pent-4-en-1-yl)hept-6-enoic acid, useful for stapling/stapled with another amino acid residue comprising an olefin group to form a staple through one of the two olefin groups and/or with another amino acid residue comprising an olefin group to form a staple through the other of the two olefin groups
  SITE 6: note = (S)-3-(2-amino-2-carboxyethyl)benzoic acid
  SITE 7: note = 1-aminocyclopentane-1-carboxylic acid
  SITE 10: note = L-lysine, useful for stapling/stapled with another amino acid residue comprising a side chain acid group to form a staple through the 6-amino group
  SITE 11: note (S)-3-amino-1-((pent-4-en-1-yloxy)carbonyl)pyrrolidine-3-ca rboxylic acid, useful for stapling/stapled with another amino acid residue comprising an olefin group to form a staple through the olefin group
  SITE 12: note = (S)-2-amino-3-(thiophen-3-yl)propanoic acid
  SITE 13: note = (S)-2-amino-3-(3,4-dichlorophenyl)propanoic acid
  SITE 14: note = L-glutamic acid, useful for stapling/stapled with another amino acid residue comprising a side chain amino group to form a staple through the 4-carboxyl group
  SITE 14: note = C-term amino
XDXXDXXAFKXXXE

SEQ ID NO: 1303 - protein, 14 aa, synthetic construct
  SITE 1: note = N-term pyrazine-2-carboxylic acid
  SITE 1: note = (R)-2-allylpyrrolidine-2-carboxylic acid, useful for stapling/stapled with another amino acid residue comprising an olefin group to form a staple through the olefin group
  SITE 3: note = (S)-2-amino-3,3-diphenylpropanoic acid
  VARIANT 4: note = 2-amino-2-(pent-4-en-1-yl)hept-6-enoic acid, useful for stapling/stapled with another amino acid residue comprising an olefin group to form a staple through one of the two olefin groups and/or with another amino acid residue comprising an olefin group to form a staple through the other of the two olefin groups
  SITE 6: note = (S)-3-(2-amino-2-carboxyethyl)benzoic acid
  SITE 7: note = 1-aminocyclopentane-1-carboxylic acid
  SITE 10: note = L-lysine, useful for stapling/stapled with another amino acid residue comprising a side chain acid group to form a staple through the 6-amino group
  SITE 11: note (S)-3-amino-1-((pent-4-en-1-yloxy)carbonyl)pyrrolidine-3-ca rboxylic acid, useful for stapling/stapled with another amino acid residue comprising an olefin group to form a staple through the olefin group
  SITE 12: note = (S)-2-amino-3-(thiophen-3-yl)propanoic acid
  SITE 13: note = (S)-2-amino-3-(3,4-dichlorophenyl)propanoic acid
  SITE 14: note = L-glutamic acid, useful for stapling/stapled with another amino acid residue comprising a side chain amino group to form a staple through the 4-carboxyl group
  SITE 14: note = C-term amino
XDXXDXXAFKXXXE

SEQ ID NO: 1304 - protein, 14 aa, synthetic construct
  SITE 1: note = N-term butyric acid
  SITE 1: note = (R)-2-allylpyrrolidine-2-carboxylic acid, useful for stapling/stapled with another amino acid residue comprising an olefin group to form a staple through the olefin group
  SITE 3: note = (S)-2-amino-3,3-diphenylpropanoic acid
  VARIANT 4: note = 2-amino-2-(pent-4-en-1-yl)hept-6-enoic acid, useful for stapling/stapled with another amino acid residue comprising an olefin group to form a staple through one of the two olefin groups and/or with another amino acid residue comprising an olefin group to form a staple through the other of the two olefin groups
  SITE 6: note = (S)-3-(2-amino-2-carboxyethyl)benzoic acid
  SITE 7: note = 1-aminocyclopentane-1-carboxylic acid
  SITE 10: note = L-lysine, useful for stapling/stapled with another amino acid residue comprising a side chain acid group to form a staple through the 6-amino group
  SITE 11: note (S)-3-amino-1-((pent-4-en-1-yloxy)carbonyl)pyrrolidine-3-ca rboxylic acid, useful for stapling/stapled with another amino acid residue comprising an olefin group to form a staple through the olefin group
  SITE 12: note = (S)-2-amino-3-(thiophen-3-yl)propanoic acid
  SITE 13: note = (S)-2-amino-3-(3,4-dichlorophenyl)propanoic acid
  SITE 14: note = L-glutamic acid, useful for stapling/stapled with another amino acid residue comprising a side chain amino group to form a staple through the 4-carboxyl group
  SITE 14: note = C-term amino
XNXXDXXAFKXXXE

SEQ ID NO: 1305 - protein, 14 aa, synthetic construct
  SITE 1: note = N-term 3-methylbutanoic acid
  SITE 1: note = (R)-2-allylpyrrolidine-2-carboxylic acid, useful for stapling/stapled with another amino acid residue comprising an olefin group to form a staple through the olefin group
  SITE 3: note = (S)-2-amino-3,3-diphenylpropanoic acid
  VARIANT 4: note = 2-amino-2-(pent-4-en-1-yl)hept-6-enoic acid, useful for stapling/stapled with another amino acid residue comprising an olefin group to form a staple through one of the two olefin groups and/or with another amino acid residue comprising an olefin group to form a staple through the other of the two olefin groups
  SITE 6: note = (S)-3-(2-amino-2-carboxyethyl)benzoic acid
  SITE 7: note = 1-aminocyclopentane-1-carboxylic acid
  SITE 10: note = L-lysine, useful for stapling/stapled with another amino acid residue comprising a side chain acid group to form a staple through the 6-amino group
  SITE 11: note (S)-3-amino-1-((pent-4-en-1-yloxy)carbonyl)pyrrolidine-3-ca rboxylic acid, useful for stapling/stapled with another amino acid residue comprising an olefin group to form a staple through the olefin group
  SITE 12: note = (S)-2-amino-3-(thiophen-3-yl)propanoic acid
  SITE 13: note = (S)-2-amino-3-(3,4-dichlorophenyl)propanoic acid
  SITE 14: note = L-glutamic acid, useful for stapling/stapled with another amino acid residue comprising a side chain amino group to form a staple through the 4-carboxyl group
  SITE 14: note = C-term amino
XNXXDXXAFKXXXE

SEQ ID NO: 1306 - protein, 14 aa, synthetic construct
  SITE 1: note = N-term cyclopropanecarboxylic acid
  SITE 1: note = (R)-2-allylpyrrolidine-2-carboxylic acid, useful for stapling/stapled with another amino acid residue comprising an olefin group to form a staple through the olefin group
  SITE 3: note = (S)-2-amino-3,3-diphenylpropanoic acid
  VARIANT 4: note = 2-amino-2-(pent-4-en-1-yl)hept-6-enoic acid, useful for stapling/stapled with another amino acid residue comprising an olefin group to form a staple through one of the two olefin groups and/or with another amino acid residue comprising an olefin group to form a staple through the other of the two olefin groups
  SITE 6: note = (S)-3-(2-amino-2-carboxyethyl)benzoic acid
  SITE 7: note = 1-aminocyclopentane-1-carboxylic acid
  SITE 10: note = L-lysine, useful for stapling/stapled with another amino acid residue comprising a side chain acid group to form a staple through the 6-amino group
  SITE 11: note (S)-3-amino-1-((pent-4-en-1-yloxy)carbonyl)pyrrolidine-3-ca rboxylic acid, useful for stapling/stapled with another amino acid residue comprising an olefin group to form a staple through the olefin group
  SITE 12: note = (S)-2-amino-3-(thiophen-3-yl)propanoic acid
  SITE 13: note = (S)-2-amino-3-(3,4-dichlorophenyl)propanoic acid
  SITE 14: note = L-glutamic acid, useful for stapling/stapled with another amino acid residue comprising a side chain amino group to form a staple through the 4-carboxyl group
  SITE 14: note = C-term amino
XNXXDXXAFKXXXE

SEQ ID NO: 1307 - protein, 14 aa, synthetic construct
  SITE 1: note = N-term cyclobutanecarboxylic acid
  SITE 1: note = (R)-2-allylpyrrolidine-2-carboxylic acid, useful for stapling/stapled with another amino acid residue comprising an olefin group to form a staple through the olefin group
  SITE 3: note = (S)-2-amino-3,3-diphenylpropanoic acid
  VARIANT 4: note = 2-amino-2-(pent-4-en-1-yl)hept-6-enoic acid, useful for stapling/stapled with another amino acid residue comprising an olefin group to form a staple through one of the two olefin groups and/or with another amino acid residue comprising an olefin group to form a staple through the other of the two olefin groups
  SITE 6: note = (S)-3-(2-amino-2-carboxyethyl)benzoic acid
  SITE 7: note = 1-aminocyclopentane-1-carboxylic acid
  SITE 10: note = L-lysine, useful for stapling/stapled with another amino acid residue comprising a side chain acid group to form a staple through the 6-amino group
  SITE 11: note (S)-3-amino-1-((pent-4-en-1-yloxy)carbonyl)pyrrolidine-3-ca rboxylic acid, useful for stapling/stapled with another amino acid residue comprising an olefin group to form a staple through the olefin group
  SITE 12: note = (S)-2-amino-3-(thiophen-3-yl)propanoic acid
  SITE 13: note = (S)-2-amino-3-(3,4-dichlorophenyl)propanoic acid
  SITE 14: note = L-glutamic acid, useful for stapling/stapled with another amino acid residue comprising a side chain amino group to form a staple through the 4-carboxyl group
  SITE 14: note = C-term amino
XNXXDXXAFKXXXE

SEQ ID NO: 1308 - protein, 14 aa, synthetic construct
  SITE 1: note = N-term cyclopentanecarboxylic acid
  SITE 1: note = (R)-2-allylpyrrolidine-2-carboxylic acid, useful for stapling/stapled with another amino acid residue comprising an olefin group to form a staple through the olefin group
  SITE 3: note = (S)-2-amino-3,3-diphenylpropanoic acid
  VARIANT 4: note = 2-amino-2-(pent-4-en-1-yl)hept-6-enoic acid, useful for stapling/stapled with another amino acid residue comprising an olefin group to form a staple through one of the two olefin groups and/or with another amino acid residue comprising an olefin group to form a staple through the other of the two olefin groups
  SITE 6: note = (S)-3-(2-amino-2-carboxyethyl)benzoic acid
  SITE 7: note = 1-aminocyclopentane-1-carboxylic acid
  SITE 10: note = L-lysine, useful for stapling/stapled with another amino acid residue comprising a side chain acid group to form a staple through the 6-amino group
  SITE 11: note (S)-3-amino-1-((pent-4-en-1-yloxy)carbonyl)pyrrolidine-3-ca rboxylic acid, useful for stapling/stapled with another amino acid residue comprising an olefin group to form a staple through the olefin group
  SITE 12: note = (S)-2-amino-3-(thiophen-3-yl)propanoic acid
  SITE 13: note = (S)-2-amino-3-(3,4-dichlorophenyl)propanoic acid
  SITE 14: note = L-glutamic acid, useful for stapling/stapled with another amino acid residue comprising a side chain amino group to form a staple through the 4-carboxyl group
  SITE 14: note = C-term amino
XNXXDXXAFKXXXE

SEQ ID NO: 1309 - protein, 14 aa, synthetic construct
  SITE 1: note = N-term 2-phenylacetic acid
  SITE 1: note = (R)-2-allylpyrrolidine-2-carboxylic acid, useful for stapling/stapled with another amino acid residue comprising an olefin group to form a staple through the olefin group
  SITE 3: note = (S)-2-amino-3,3-diphenylpropanoic acid
  VARIANT 4: note = 2-amino-2-(pent-4-en-1-yl)hept-6-enoic acid, useful for stapling/stapled with another amino acid residue comprising an olefin group to form a staple through one of the two olefin groups and/or with another amino acid residue comprising an olefin group to form a staple through the other of the two olefin groups
  SITE 6: note = (S)-3-(2-amino-2-carboxyethyl)benzoic acid
  SITE 7: note = 1-aminocyclopentane-1-carboxylic acid
  SITE 10: note = L-lysine, useful for stapling/stapled with another amino acid residue comprising a side chain acid group to form a staple through the 6-amino group
  SITE 11: note (S)-3-amino-1-((pent-4-en-1-yloxy)carbonyl)pyrrolidine-3-ca rboxylic acid, useful for stapling/stapled with another amino acid residue comprising an olefin group to form a staple through the olefin group
  SITE 12: note = (S)-2-amino-3-(thiophen-3-yl)propanoic acid
  SITE 13: note = (S)-2-amino-3-(3,4-dichlorophenyl)propanoic acid
  SITE 14: note = L-glutamic acid, useful for stapling/stapled with another amino acid residue comprising a side chain amino group to form a staple through the 4-carboxyl group
  SITE 14: note = C-term amino
XNXXDXXAFKXXXE

SEQ ID NO: 1310 - protein, 14 aa, synthetic construct
  SITE 1: note = N-term 2,2,2-trifluoroacetic acid
  SITE 1: note = (R)-2-allylpyrrolidine-2-carboxylic acid, useful for stapling/stapled with another amino acid residue comprising an olefin group to form a staple through the olefin group
  SITE 3: note = (S)-2-amino-3,3-diphenylpropanoic acid
  VARIANT 4: note = 2-amino-2-(pent-4-en-1-yl)hept-6-enoic acid, useful for stapling/stapled with another amino acid residue comprising an olefin group to form a staple through one of the two olefin groups and/or with another amino acid residue comprising an olefin group to form a staple through the other of the two olefin groups
  SITE 6: note = (S)-3-(2-amino-2-carboxyethyl)benzoic acid
  SITE 7: note = 1-aminocyclopentane-1-carboxylic acid
  SITE 10: note = L-lysine, useful for stapling/stapled with another amino acid residue comprising a side chain acid group to form a staple through the 6-amino group
  SITE 11: note (S)-3-amino-1-((pent-4-en-1-yloxy)carbonyl)pyrrolidine-3-ca rboxylic acid, useful for stapling/stapled with another amino acid residue comprising an olefin group to form a staple through the olefin group
  SITE 12: note = (S)-2-amino-3-(thiophen-3-yl)propanoic acid
  SITE 13: note = (S)-2-amino-3-(3,4-dichlorophenyl)propanoic acid
  SITE 14: note = L-glutamic acid, useful for stapling/stapled with another amino acid residue comprising a side chain amino group to form a staple through the 4-carboxyl group
  SITE 14: note = C-term amino
XNXXDXXAFKXXXE

SEQ ID NO: 1311 - protein, 14 aa, synthetic construct
  SITE 1: note = N-term 2-(quinolin-6-yl)acetic acid
  SITE 1: note = (R)-2-allylpyrrolidine-2-carboxylic acid, useful for stapling/stapled with another amino acid residue comprising an olefin group to form a staple through the olefin group
  SITE 3: note = (S)-2-amino-3,3-diphenylpropanoic acid
  VARIANT 4: note = 2-amino-2-(pent-4-en-1-yl)hept-6-enoic acid, useful for stapling/stapled with another amino acid residue comprising an olefin group to form a staple through one of the two olefin groups and/or with another amino acid residue comprising an olefin group to form a staple through the other of the two olefin groups
  SITE 6: note = (S)-3-(2-amino-2-carboxyethyl)benzoic acid
  SITE 7: note = 1-aminocyclopentane-1-carboxylic acid
  SITE 10: note = L-lysine, useful for stapling/stapled with another amino acid residue comprising a side chain acid group to form a staple through the 6-amino group
  SITE 11: note (S)-3-amino-1-((pent-4-en-1-yloxy)carbonyl)pyrrolidine-3-ca rboxylic acid, useful for stapling/stapled with another amino acid residue comprising an olefin group to form a staple through the olefin group
  SITE 12: note = (S)-2-amino-3-(thiophen-3-yl)propanoic acid
  SITE 13: note = (S)-2-amino-3-(3,4-dichlorophenyl)propanoic acid
  SITE 14: note = L-glutamic acid, useful for stapling/stapled with another amino acid residue comprising a side chain amino group to form a staple through the 4-carboxyl group
  SITE 14: note = C-term amino
XNXXDXXAFKXXXE

SEQ ID NO: 1312 - protein, 14 aa, synthetic construct
  SITE 1: note = N-term 2-(1H-1,2,4-triazol-1-yl)acetic acid
  SITE 1: note = (R)-2-allylpyrrolidine-2-carboxylic acid, useful for stapling/stapled with another amino acid residue comprising an olefin group to form a staple through the olefin group
  SITE 3: note = (S)-2-amino-3,3-diphenylpropanoic acid
  VARIANT 4: note = 2-amino-2-(pent-4-en-1-yl)hept-6-enoic acid, useful for stapling/stapled with another amino acid residue comprising an olefin group to form a staple through one of the two olefin groups and/or with another amino acid residue comprising an olefin group to form a staple through the other of the two olefin groups
  SITE 6: note = (S)-3-(2-amino-2-carboxyethyl)benzoic acid
  SITE 7: note = 1-aminocyclopentane-1-carboxylic acid
  SITE 10: note = L-lysine, useful for stapling/stapled with another amino acid residue comprising a side chain acid group to form a staple through the 6-amino group
  SITE 11: note (S)-3-amino-1-((pent-4-en-1-yloxy)carbonyl)pyrrolidine-3-ca rboxylic acid, useful for stapling/stapled with another amino acid residue comprising an olefin group to form a staple through the olefin group
  SITE 12: note = (S)-2-amino-3-(thiophen-3-yl)propanoic acid
  SITE 13: note = (S)-2-amino-3-(3,4-dichlorophenyl)propanoic acid
  SITE 14: note = L-glutamic acid, useful for stapling/stapled with another amino acid residue comprising a side chain amino group to form a staple through the 4-carboxyl group
  SITE 14: note = C-term amino
XNXXDXXAFKXXXE

SEQ ID NO: 1313 - protein, 14 aa, synthetic construct
  SITE 1: note = N-term 1-(pyridin-2-yl)cyclopropane-1-carboxylic acid
  SITE 1: note = (R)-2-allylpyrrolidine-2-carboxylic acid, useful for stapling/stapled with another amino acid residue comprising an olefin group to form a staple through the olefin group
  SITE 3: note = (S)-2-amino-3,3-diphenylpropanoic acid
  VARIANT 4: note = 2-amino-2-(pent-4-en-1-yl)hept-6-enoic acid, useful for stapling/stapled with another amino acid residue comprising an olefin group to form a staple through one of the two olefin groups and/or with another amino acid residue comprising an olefin group to form a staple through the other of the two olefin groups
  SITE 6: note = (S)-3-(2-amino-2-carboxyethyl)benzoic acid
  SITE 7: note = 1-aminocyclopentane-1-carboxylic acid
  SITE 10: note = L-lysine, useful for stapling/stapled with another amino acid residue comprising a side chain acid group to form a staple through the 6-amino group
  SITE 11: note (S)-3-amino-1-((pent-4-en-1-yloxy)carbonyl)pyrrolidine-3-ca rboxylic acid, useful for stapling/stapled with another amino acid residue comprising an olefin group to form a staple through the olefin group
  SITE 12: note = (S)-2-amino-3-(thiophen-3-yl)propanoic acid
  SITE 13: note = (S)-2-amino-3-(3,4-dichlorophenyl)propanoic acid
  SITE 14: note = L-glutamic acid, useful for stapling/stapled with another amino acid residue comprising a side chain amino group to form a staple through the 4-carboxyl group
  SITE 14: note = C-term amino
XNXXDXXAFKXXXE

SEQ ID NO: 1314 - protein, 14 aa, synthetic construct
  SITE 1: note = N-term 4-(pyridin-2-yl)butanoic acid
  SITE 1: note = (R)-2-allylpyrrolidine-2-carboxylic acid, useful for stapling/stapled with another amino acid residue comprising an olefin group to form a staple through the olefin group
  SITE 3: note = (S)-2-amino-3,3-diphenylpropanoic acid
  VARIANT 4: note = 2-amino-2-(pent-4-en-1-yl)hept-6-enoic acid, useful for stapling/stapled with another amino acid residue comprising an olefin group to form a staple through one of the two olefin groups and/or with another amino acid residue comprising an olefin group to form a staple through the other of the two olefin groups
  SITE 6: note = (S)-3-(2-amino-2-carboxyethyl)benzoic acid
  SITE 7: note = 1-aminocyclopentane-1-carboxylic acid
  SITE 10: note = L-lysine, useful for stapling/stapled with another amino acid residue comprising a side chain acid group to form a staple through the 6-amino group
  SITE 11: note (S)-3-amino-1-((pent-4-en-1-yloxy)carbonyl)pyrrolidine-3-ca rboxylic acid, useful for stapling/stapled with another amino acid residue comprising an olefin group to form a staple through the olefin group
  SITE 12: note = (S)-2-amino-3-(thiophen-3-yl)propanoic acid
  SITE 13: note = (S)-2-amino-3-(3,4-dichlorophenyl)propanoic acid
  SITE 14: note = L-glutamic acid, useful for stapling/stapled with another amino acid residue comprising a side chain amino group to form a staple through the 4-carboxyl group
  SITE 14: note = C-term amino
XNXXDXXAFKXXXE

SEQ ID NO: 1315 - protein, 14 aa, synthetic construct
  SITE 1: note = N-term pyrazine-2-carboxylic acid
  SITE 1: note = (R)-2-allylpyrrolidine-2-carboxylic acid, useful for stapling/stapled with another amino acid residue comprising an olefin group to form a staple through the olefin group
  SITE 3: note = (S)-2-amino-3,3-diphenylpropanoic acid
  VARIANT 4: note = 2-amino-2-(pent-4-en-1-yl)hept-6-enoic acid, useful for stapling/stapled with another amino acid residue comprising an olefin group to form a staple through one of the two olefin groups and/or with another amino acid residue comprising an olefin group to form a staple through the other of the two olefin groups
  SITE 6: note = (S)-3-(2-amino-2-carboxyethyl)benzoic acid
  SITE 7: note = 1-aminocyclopentane-1-carboxylic acid
  SITE 10: note = L-lysine, useful for stapling/stapled with another amino acid residue comprising a side chain acid group to form a staple through the 6-amino group
  SITE 11: note (S)-3-amino-1-((pent-4-en-1-yloxy)carbonyl)pyrrolidine-3-ca rboxylic acid, useful for stapling/stapled with another amino acid residue comprising an olefin group to form a staple through the olefin group
  SITE 12: note = (S)-2-amino-3-(thiophen-3-yl)propanoic acid
  SITE 13: note = (S)-2-amino-3-(3,4-dichlorophenyl)propanoic acid
  SITE 14: note = L-glutamic acid, useful for stapling/stapled with another amino acid residue comprising a side chain amino group to form a staple through the 4-carboxyl group
  SITE 14: note = C-term amino
XNXXDXXAFKXXXE

SEQ ID NO: 1316 - protein, 15 aa, synthetic construct
  SITE 1: note = N-term Acetic Acid
  SITE 1: note = (R)-2-allylpyrrolidine-2-carboxylic acid, useful for stapling/stapled with another amino acid residue comprising an olefin group to form a staple through the olefin group
  SITE 3: note = (S)-2-amino-4,4-dimethylpentanoic acid
  VARIANT 4: note = 2-amino-2-(pent-4-en-1-yl)hept-6-enoic acid, useful for stapling/stapled with another amino acid residue comprising an olefin group to form a staple through one of the two olefin groups and/or with another amino acid residue comprising an olefin group to form a staple through the other of the two olefin groups
  SITE 6: note = (S)-3-(2-amino-2-carboxyethyl)benzoic acid
  SITE 7: note = 2-amino-2-methylpropanoic acid
  SITE 10: note = L-lysine, useful for stapling/stapled with another amino acid residue comprising a side chain acid group to form a staple through the 6-amino group
  SITE 11: note (S)-3-amino-1-((pent-4-en-1-yloxy)carbonyl)pyrrolidine-3-ca rboxylic acid, useful for stapling/stapled with another amino acid residue comprising an olefin group to form a staple through the olefin group
  SITE 12: note = (S)-2-amino-3-(2-aminophenyl)propanoic acid
  SITE 13: note = (S)-2-amino-3-(benzo[b]thiophen-3-yl)propanoic acid
  SITE 14: note = L-glutamic acid, useful for stapling/stapled with another amino acid residue comprising a side chain amino group to form a staple through the 4-carboxyl group
  SITE 15: note = C-term amino
XDXXDXXAFKXXXEA

SEQ ID NO: 1317 - protein, 15 aa, synthetic construct
  SITE 1: note = N-term Acetic Acid
  SITE 1: note = (R)-2-allylpyrrolidine-2-carboxylic acid, useful for stapling/stapled with another amino acid residue comprising an olefin group to form a staple through the olefin group
  SITE 3: note = (S)-2-amino-4,4-dimethylpentanoic acid
  VARIANT 4: note = 2-amino-2-(pent-4-en-1-yl)hept-6-enoic acid, useful for stapling/stapled with another amino acid residue comprising an olefin group to form a staple through one of the two olefin groups and/or with another amino acid residue comprising an olefin group to form a staple through the other of the two olefin groups
  SITE 6: note = (S)-3-(2-amino-2-carboxyethyl)benzoic acid
  SITE 7: note = 2-amino-2-methylpropanoic acid
  SITE 10: note = L-lysine, useful for stapling/stapled with another amino acid residue comprising a side chain acid group to form a staple through the 6-amino group
  SITE 11: note (S)-3-amino-1-((pent-4-en-1-yloxy)carbonyl)pyrrolidine-3-ca rboxylic acid, useful for stapling/stapled with another amino acid residue comprising an olefin group to form a staple through the olefin group
  SITE 12: note = (S)-3-(2-(2-(1H-1,2,4-triazol-1-yl)acetamido)phenyl) -2-aminopropanoic acid
  SITE 13: note = (S)-2-amino-3-(benzo[b]thiophen-3-yl)propanoic acid
  SITE 14: note = L-glutamic acid, useful for stapling/stapled with another amino acid residue comprising a side chain amino group to form a staple through the 4-carboxyl group
  SITE 15: note = C-term amino
XDXXDXXAFKXXXEA

SEQ ID NO: 1318 - protein, 15 aa, synthetic construct
  SITE 1: note = N-term Acetic Acid
  SITE 1: note = (R)-2-allylpyrrolidine-2-carboxylic acid, useful for stapling/stapled with another amino acid residue comprising an olefin group to form a staple through the olefin group
  SITE 3: note = (S)-2-amino-4,4-dimethylpentanoic acid
  VARIANT 4: note = 2-amino-2-(pent-4-en-1-yl)hept-6-enoic acid, useful for stapling/stapled with another amino acid residue comprising an olefin group to form a staple through one of the two olefin groups and/or with another amino acid residue comprising an olefin group to form a staple through the other of the two olefin groups
  SITE 6: note = (S)-3-(2-amino-2-carboxyethyl)benzoic acid
  SITE 7: note = 2-amino-2-methylpropanoic acid
  SITE 10: note = L-lysine, useful for stapling/stapled with another amino acid residue comprising a side chain acid group to form a staple through the 6-amino group
  SITE 11: note (S)-3-amino-1-((pent-4-en-1-yloxy)carbonyl)pyrrolidine-3-ca rboxylic acid, useful for stapling/stapled with another amino acid residue comprising an olefin group to form a staple through the olefin group
  SITE 12: note (S)-3-(2-(3-(1H-1,2,4-triazol-1-yl)propanamido)phenyl)-2- aminopropanoic acid
  SITE 13: note = (S)-2-amino-3-(benzo[b]thiophen-3-yl)propanoic acid
  SITE 14: note = L-glutamic acid, useful for stapling/stapled with another amino acid residue comprising a side chain amino group to form a staple through the 4-carboxyl group
  SITE 15: note = C-term amino
XDXXDXXAFKXXXEA

SEQ ID NO: 1319 - protein, 15 aa, synthetic construct
  SITE 1: note = N-term Acetic Acid
  SITE 1: note = (R)-2-allylpyrrolidine-2-carboxylic acid, useful for stapling/stapled with another amino acid residue comprising an olefin group to form a staple through the olefin group
  SITE 3: note = (S)-2-amino-4,4-dimethylpentanoic acid
  VARIANT 4: note = 2-amino-2-(pent-4-en-1-yl)hept-6-enoic acid, useful for stapling/stapled with another amino acid residue comprising an olefin group to form a staple through one of the two olefin groups and/or with another amino acid residue comprising an olefin group to form a staple through the other of the two olefin groups
  SITE 6: note = (S)-3-(2-amino-2-carboxyethyl)benzoic acid
  SITE 7: note = 2-amino-2-methylpropanoic acid
  SITE 10: note = L-lysine, useful for stapling/stapled with another amino acid residue comprising a side chain acid group to form a staple through the 6-amino group
  SITE 11: note (S)-3-amino-1-((pent-4-en-1-yloxy)carbonyl)pyrrolidine-3-ca rboxylic acid, useful for stapling/stapled with another amino acid residue comprising an olefin group to form a staple through the olefin group
  SITE 12: note (S)-2-amino-3-(2-(2-(quinolin-6-yl)acetamido)phenyl)propano ic acid
  SITE 13: note = (S)-2-amino-3-(benzo[b]thiophen-3-yl)propanoic acid
  SITE 14: note = L-glutamic acid, useful for stapling/stapled with another amino acid residue comprising a side chain amino group to form a staple through the 4-carboxyl group
  SITE 15: note = C-term amino
XDXXDXXAFKXXXEA

SEQ ID NO: 1320 - protein, 15 aa, synthetic construct
  SITE 1: note = N-term Acetic Acid
  SITE 1: note = (R)-2-allylpyrrolidine-2-carboxylic acid, useful for stapling/stapled with another amino acid residue comprising an olefin group to form a staple through the olefin group
  SITE 3: note = (S)-2-amino-4,4-dimethylpentanoic acid
  VARIANT 4: note = 2-amino-2-(pent-4-en-1-yl)hept-6-enoic acid, useful for stapling/stapled with another amino acid residue comprising an olefin group to form a staple through one of the two olefin groups and/or with another amino acid residue comprising an olefin group to form a staple through the other of the two olefin groups
  SITE 6: note = (S)-3-(2-amino-2-carboxyethyl)benzoic acid
  SITE 7: note = 2-amino-2-methylpropanoic acid
  SITE 10: note = L-lysine, useful for stapling/stapled with another amino acid residue comprising a side chain acid group to form a staple through the 6-amino group
  SITE 11: note (S)-3-amino-1-((pent-4-en-1-yloxy)carbonyl)pyrrolidine-3-ca rboxylic acid, useful for stapling/stapled with another amino acid residue comprising an olefin group to form a staple through the olefin group
  SITE 12: note (S)-2-amino-3-(2-(2-(pyridin-2-yl)acetamido)phenyl)propanoi c acid
  SITE 13: note = (S)-2-amino-3-(benzo[b]thiophen-3-yl)propanoic acid
  SITE 14: note = L-glutamic acid, useful for stapling/stapled with another amino acid residue comprising a side chain amino group to form a staple through the 4-carboxyl group
  SITE 15: note = C-term amino
XDXXDXXAFKXXXEA

SEQ ID NO: 1321 - protein, 15 aa, synthetic construct
  SITE 1: note = N-term Acetic Acid
  SITE 1: note = (R)-2-allylpyrrolidine-2-carboxylic acid, useful for stapling/stapled with another amino acid residue comprising an olefin group to form a staple through the olefin group
  SITE 3: note = (S)-2-amino-4,4-dimethylpentanoic acid
  VARIANT 4: note = 2-amino-2-(pent-4-en-1-yl)hept-6-enoic acid, useful for stapling/stapled with another amino acid residue comprising an olefin group to form a staple through one of the two olefin groups and/or with another amino acid residue comprising an olefin group to form a staple through the other of the two olefin groups
  SITE 6: note = (S)-3-(2-amino-2-carboxyethyl)benzoic acid
  SITE 7: note = 2-amino-2-methylpropanoic acid
  SITE 10: note = L-lysine, useful for stapling/stapled with another amino acid residue comprising a side chain acid group to form a staple through the 6-amino group
  SITE 11: note (S)-3-amino-1-((pent-4-en-1-yloxy)carbonyl)pyrrolidine-3-ca rboxylic acid, useful for stapling/stapled with another amino acid residue comprising an olefin group to form a staple through the olefin group
  SITE 12: note (S)-2-amino-3-(2-(3-(pyridin-2-yl)propanamido)phenyl)propan oic acid
  SITE 13: note = (S)-2-amino-3-(benzo[b]thiophen-3-yl)propanoic acid
  SITE 14: note = L-glutamic acid, useful for stapling/stapled with another amino acid residue comprising a side chain amino group to form a staple through the 4-carboxyl group
  SITE 15: note = C-term amino
XDXXDXXAFKXXXEA

SEQ ID NO: 1322 - protein, 15 aa, synthetic construct
  SITE 1: note = N-term Acetic Acid
  SITE 1: note = (R)-2-allylpyrrolidine-2-carboxylic acid, useful for stapling/stapled with another amino acid residue comprising an olefin group to form a staple through the olefin group
  SITE 3: note = (S)-2-amino-4,4-dimethylpentanoic acid
  VARIANT 4: note = 2-amino-2-(pent-4-en-1-yl)hept-6-enoic acid, useful for stapling/stapled with another amino acid residue comprising an olefin group to form a staple through one of the two olefin groups and/or with another amino acid residue comprising an olefin group to form a staple through the other of the two olefin groups
  SITE 6: note = (S)-3-(2-amino-2-carboxyethyl)benzoic acid
  SITE 7: note = 2-amino-2-methylpropanoic acid
  SITE 10: note = L-lysine, useful for stapling/stapled with another amino acid residue comprising a side chain acid group to form a staple through the 6-amino group
  SITE 11: note (S)-3-amino-1-((pent-4-en-1-yloxy)carbonyl)pyrrolidine-3-ca rboxylic acid, useful for stapling/stapled with another amino acid residue comprising an olefin group to form a staple through the olefin group
  SITE 12: note (S)-2-amino-3-(2-(3-(pyridin-3-yl)propanamido)phenyl)propan oic acid
  SITE 13: note = (S)-2-amino-3-(benzo[b]thiophen-3-yl)propanoic acid
  SITE 14: note = L-glutamic acid, useful for stapling/stapled with another amino acid residue comprising a side chain amino group to form a staple through the 4-carboxyl group
  SITE 15: note = C-term amino
XDXXDXXAFKXXXEA

SEQ ID NO: 1323 - protein, 15 aa, synthetic construct
  SITE 1: note = N-term Acetic Acid
  SITE 1: note = (R)-2-allylpyrrolidine-2-carboxylic acid, useful for stapling/stapled with another amino acid residue comprising an olefin group to form a staple through the olefin group
  SITE 3: note = (S)-2-amino-4,4-dimethylpentanoic acid
  VARIANT 4: note = 2-amino-2-(pent-4-en-1-yl)hept-6-enoic acid, useful for stapling/stapled with another amino acid residue comprising an olefin group to form a staple through one of the two olefin groups and/or with another amino acid residue comprising an olefin group to form a staple through the other of the two olefin groups
  SITE 6: note = (S)-3-(2-amino-2-carboxyethyl)benzoic acid
  SITE 7: note = 2-amino-2-methylpropanoic acid
  SITE 10: note = L-lysine, useful for stapling/stapled with another amino acid residue comprising a side chain acid group to form a staple through the 6-amino group
  SITE 11: note (S)-3-amino-1-((pent-4-en-1-yloxy)carbonyl)pyrrolidine-3-ca rboxylic acid, useful for stapling/stapled with another amino acid residue comprising an olefin group to form a staple through the olefin group
  SITE 12: note (S)-2-amino-3-(2-(3-(pyridin-4-yl)propanamido)phenyl)propan oic acid
  SITE 13: note = (S)-2-amino-3-(benzo[b]thiophen-3-yl)propanoic acid
  SITE 14: note = L-glutamic acid, useful for stapling/stapled with another amino acid residue comprising a side chain amino group to form a staple through the 4-carboxyl group
  SITE 15: note = C-term amino
XDXXDXXAFKXXXEA

SEQ ID NO: 1324 - protein, 15 aa, synthetic construct
  SITE 1: note = N-term Acetic Acid
  SITE 1: note = (R)-2-allylpyrrolidine-2-carboxylic acid, useful for stapling/stapled with another amino acid residue comprising an olefin group to form a staple through the olefin group
  SITE 3: note = (S)-2-amino-4,4-dimethylpentanoic acid
  VARIANT 4: note = 2-amino-2-(pent-4-en-1-yl)hept-6-enoic acid, useful for stapling/stapled with another amino acid residue comprising an olefin group to form a staple through one of the two olefin groups and/or with another amino acid residue comprising an olefin group to form a staple through the other of the two olefin groups
  SITE 6: note = (S)-3-(2-amino-2-carboxyethyl)benzoic acid
  SITE 7: note = 2-amino-2-methylpropanoic acid
  SITE 10: note = L-lysine, useful for stapling/stapled with another amino acid residue comprising a side chain acid group to form a staple through the 6-amino group
  SITE 11: note (S)-3-amino-1-((pent-4-en-1-yloxy)carbonyl)pyrrolidine-3-ca rboxylic acid, useful for stapling/stapled with another amino acid residue comprising an olefin group to form a staple through the olefin group
  SITE 12: note (S)-2-amino-3-(2-(3-methoxypropanamido)phenyl)propanoic acid
  SITE 13: note = (S)-2-amino-3-(benzo[b]thiophen-3-yl)propanoic acid
  SITE 14: note = L-glutamic acid, useful for stapling/stapled with another amino acid residue comprising a side chain amino group to form a staple through the 4-carboxyl group
  SITE 15: note = C-term amino
XDXXDXXAFKXXXEA

SEQ ID NO: 1325 - protein, 15 aa, synthetic construct
  SITE 1: note = N-term Acetic Acid
  SITE 1: note = (R)-2-allylpyrrolidine-2-carboxylic acid, useful for stapling/stapled with another amino acid residue comprising an olefin group to form a staple through the olefin group
  SITE 3: note = (S)-2-amino-4,4-dimethylpentanoic acid
  VARIANT 4: note = 2-amino-2-(pent-4-en-1-yl)hept-6-enoic acid, useful for stapling/stapled with another amino acid residue comprising an olefin group to form a staple through one of the two olefin groups and/or with another amino acid residue comprising an olefin group to form a staple through the other of the two olefin groups
  SITE 6: note = (S)-3-(2-amino-2-carboxyethyl)benzoic acid
  SITE 7: note = 2-amino-2-methylpropanoic acid
  SITE 10: note = L-lysine, useful for stapling/stapled with another amino acid residue comprising a side chain acid group to form a staple through the 6-amino group
  SITE 11: note (S)-3-amino-1-((pent-4-en-1-yloxy)carbonyl)pyrrolidine-3-ca rboxylic acid, useful for stapling/stapled with another amino acid residue comprising an olefin group to form a staple through the olefin group
  SITE 12: note (S)-2-amino-3-(2-(3-phenoxypropanamido)phenyl)propanoic acid
  SITE 13: note = (S)-2-amino-3-(benzo[b]thiophen-3-yl)propanoic acid
  SITE 14: note = L-glutamic acid, useful for stapling/stapled with another amino acid residue comprising a side chain amino group to form a staple through the 4-carboxyl group
  SITE 15: note = C-term amino
XDXXDXXAFKXXXEA

SEQ ID NO: 1326 - protein, 15 aa, synthetic construct
  SITE 1: note = N-term Acetic Acid
  SITE 1: note = (R)-2-allylpyrrolidine-2-carboxylic acid, useful for stapling/stapled with another amino acid residue comprising an olefin group to form a staple through the olefin group
  SITE 3: note = (S)-2-amino-4,4-dimethylpentanoic acid
  VARIANT 4: note = 2-amino-2-(pent-4-en-1-yl)hept-6-enoic acid, useful for stapling/stapled with another amino acid residue comprising an olefin group to form a staple through one of the two olefin groups and/or with another amino acid residue comprising an olefin group to form a staple through the other of the two olefin groups
  SITE 6: note = (S)-3-(2-amino-2-carboxyethyl)benzoic acid
  SITE 7: note = 2-amino-2-methylpropanoic acid
  SITE 10: note = L-lysine, useful for stapling/stapled with another amino acid residue comprising a side chain acid group to form a staple through the 6-amino group
  SITE 11: note (S)-3-amino-1-((pent-4-en-1-yloxy)carbonyl)pyrrolidine-3-ca rboxylic acid, useful for stapling/stapled with another amino acid residue comprising an olefin group to form a staple through the olefin group
  SITE 12: note (S)-2-amino-3-(2-(3-methoxy-2,2-dimethylpropanamido)phenyl) propanoic acid
  SITE 13: note = (S)-2-amino-3-(benzo[b]thiophen-3-yl)propanoic acid
  SITE 14: note = L-glutamic acid, useful for stapling/stapled with another amino acid residue comprising a side chain amino group to form a staple through the 4-carboxyl group
  SITE 15: note = C-term amino
XDXXDXXAFKXXXEA

SEQ ID NO: 1327 - protein, 15 aa, synthetic construct
  SITE 1: note = N-term Acetic Acid
  SITE 1: note = (R)-2-allylpyrrolidine-2-carboxylic acid, useful for stapling/stapled with another amino acid residue comprising an olefin group to form a staple through the olefin group
  SITE 3: note = (S)-2-amino-4,4-dimethylpentanoic acid
  VARIANT 4: note = 2-amino-2-(pent-4-en-1-yl)hept-6-enoic acid, useful for stapling/stapled with another amino acid residue comprising an olefin group to form a staple through one of the two olefin groups and/or with another amino acid residue comprising an olefin group to form a staple through the other of the two olefin groups
  SITE 6: note = (S)-3-(2-amino-2-carboxyethyl)benzoic acid
  SITE 7: note = 2-amino-2-methylpropanoic acid
  SITE 10: note = L-lysine, useful for stapling/stapled with another amino acid residue comprising a side chain acid group to form a staple through the 6-amino group
  SITE 11: note (S)-3-amino-1-((pent-4-en-1-yloxy)carbonyl)pyrrolidine-3-ca rboxylic acid, useful for stapling/stapled with another amino acid residue comprising an olefin group to form a staple through the olefin group
  SITE 12: note (S)-2-amino-3-(2-(2-(dimethylamino)acetamido)phenyl)propano ic acid
  SITE 13: note = (S)-2-amino-3-(benzo[b]thiophen-3-yl)propanoic acid
  SITE 14: note = L-glutamic acid, useful for stapling/stapled with another amino acid residue comprising a side chain amino group to form a staple through the 4-carboxyl group
  SITE 15: note = C-term amino
XDXXDXXAFKXXXEA

SEQ ID NO: 1328 - protein, 15 aa, synthetic construct
  SITE 1: note = N-term Acetic Acid
  SITE 1: note = (R)-2-allylpyrrolidine-2-carboxylic acid, useful for stapling/stapled with another amino acid residue comprising an olefin group to form a staple through the olefin group
  SITE 3: note = (S)-2-amino-4,4-dimethylpentanoic acid
  VARIANT 4: note = 2-amino-2-(pent-4-en-1-yl)hept-6-enoic acid, useful for stapling/stapled with another amino acid residue comprising an olefin group to form a staple through one of the two olefin groups and/or with another amino acid residue comprising an olefin group to form a staple through the other of the two olefin groups
  SITE 6: note = (S)-3-(2-amino-2-carboxyethyl)benzoic acid
  SITE 7: note = 2-amino-2-methylpropanoic acid
  SITE 10: note = L-lysine, useful for stapling/stapled with another amino acid residue comprising a side chain acid group to form a staple through the 6-amino group
  SITE 11: note (S)-3-amino-1-((pent-4-en-1-yloxy)carbonyl)pyrrolidine-3-ca rboxylic acid, useful for stapling/stapled with another amino acid residue comprising an olefin group to form a staple through the olefin group
  SITE 12: note (S)-2-amino-3-(2-(3-(dimethylamino)propanamido)phenyl)propa noic acid
  SITE 13: note = (S)-2-amino-3-(benzo[b]thiophen-3-yl)propanoic acid
  SITE 14: note = L-glutamic acid, useful for stapling/stapled with another amino acid residue comprising a side chain amino group to form a staple through the 4-carboxyl group
  SITE 15: note = C-term amino
XDXXDXXAFKXXXEA

SEQ ID NO: 1329 - protein, 15 aa, synthetic construct
  SITE 1: note = N-term Acetic Acid
  SITE 1: note = (R)-2-allylpyrrolidine-2-carboxylic acid, useful for stapling/stapled with another amino acid residue comprising an olefin group to form a staple through the olefin group
  SITE 3: note = (S)-2-amino-4,4-dimethylpentanoic acid
  VARIANT 4: note = 2-amino-2-(pent-4-en-1-yl)hept-6-enoic acid, useful for stapling/stapled with another amino acid residue comprising an olefin group to form a staple through one of the two olefin groups and/or with another amino acid residue comprising an olefin group to form a staple through the other of the two olefin groups
  SITE 6: note = (S)-3-(2-amino-2-carboxyethyl)benzoic acid
  SITE 7: note = 2-amino-2-methylpropanoic acid
  SITE 10: note = L-lysine, useful for stapling/stapled with another amino acid residue comprising a side chain acid group to form a staple through the 6-amino group
  SITE 11: note (S)-3-amino-1-((pent-4-en-1-yloxy)carbonyl)pyrrolidine-3-ca rboxylic acid, useful for stapling/stapled with another amino acid residue comprising an olefin group to form a staple through the olefin group
  SITE 12: note (S)-2-amino-3-(2-(4-(dimethylamino)butanamido)phenyl)propan oic acid
  SITE 13: note = (S)-2-amino-3-(benzo[b]thiophen-3-yl)propanoic acid
  SITE 14: note = L-glutamic acid, useful for stapling/stapled with another amino acid residue comprising a side chain amino group to form a staple through the 4-carboxyl group
  SITE 15: note = C-term amino
XDXXDXXAFKXXXEA

SEQ ID NO: 1330 - protein, 15 aa, synthetic construct
  SITE 1: note = N-term Acetic Acid
  SITE 1: note = (R)-2-allylpyrrolidine-2-carboxylic acid, useful for stapling/stapled with another amino acid residue comprising an olefin group to form a staple through the olefin group
  SITE 3: note = (S)-2-amino-4,4-dimethylpentanoic acid
  VARIANT 4: note = 2-amino-2-(pent-4-en-1-yl)hept-6-enoic acid, useful for stapling/stapled with another amino acid residue comprising an olefin group to form a staple through one of the two olefin groups and/or with another amino acid residue comprising an olefin group to form a staple through the other of the two olefin groups
  SITE 6: note = (S)-3-(2-amino-2-carboxyethyl)benzoic acid
  SITE 7: note = 2-amino-2-methylpropanoic acid
  SITE 10: note = L-lysine, useful for stapling/stapled with another amino acid residue comprising a side chain acid group to form a staple through the 6-amino group
  SITE 11: note (S)-3-amino-1-((pent-4-en-1-yloxy)carbonyl)pyrrolidine-3-ca rboxylic acid, useful for stapling/stapled with another amino acid residue comprising an olefin group to form a staple through the olefin group
  SITE 12: note (S)-2-amino-3-(2-(2-(imidazo[1,2-a]pyridin-3-yl)acetamido) phenyl)propanoic acid
  SITE 13: note = (S)-2-amino-3-(benzo[b]thiophen-3-yl)propanoic acid
  SITE 14: note = L-glutamic acid, useful for stapling/stapled with another amino acid residue comprising a side chain amino group to form a staple through the 4-carboxyl group
  SITE 15: note = C-term amino
XDXXDXXAFKXXXEA

SEQ ID NO: 1331 - protein, 15 aa, synthetic construct
  SITE 1: note = N-term Acetic Acid
  SITE 1: note = (R)-2-allylpyrrolidine-2-carboxylic acid, useful for stapling/stapled with another amino acid residue comprising an olefin group to form a staple through the olefin group
  SITE 3: note = (S)-2-amino-4,4-dimethylpentanoic acid
  VARIANT 4: note = 2-amino-2-(pent-4-en-1-yl)hept-6-enoic acid, useful for stapling/stapled with another amino acid residue comprising an olefin group to form a staple through one of the two olefin groups and/or with another amino acid residue comprising an olefin group to form a staple through the other of the two olefin groups
  SITE 6: note = (S)-3-(2-amino-2-carboxyethyl)benzoic acid
  SITE 7: note = 2-amino-2-methylpropanoic acid
  SITE 10: note = L-lysine, useful for stapling/stapled with another amino acid residue comprising a side chain acid group to form a staple through the 6-amino group
  SITE 11: note (S)-3-amino-1-((pent-4-en-1-yloxy)carbonyl)pyrrolidine-3-ca rboxylic acid, useful for stapling/stapled with another amino acid residue comprising an olefin group to form a staple through the olefin group
  SITE 12: note (S)-2-amino-3-(2-(pyrazolo[1,5-a]pyrimidine-3-carboxamido) phenyl)propanoic acid
  SITE 13: note = (S)-2-amino-3-(benzo[b]thiophen-3-yl)propanoic acid
  SITE 14: note = L-glutamic acid, useful for stapling/stapled with another amino acid residue comprising a side chain amino group to form a staple through the 4-carboxyl group
  SITE 15: note = C-term amino
XDXXDXXAFKXXXEA

SEQ ID NO: 1332 - protein, 15 aa, synthetic construct
  SITE 1: note = N-term Acetic Acid
  SITE 1: note = (R)-2-allylpyrrolidine-2-carboxylic acid, useful for stapling/stapled with another amino acid residue comprising an olefin group to form a staple through the olefin group
  SITE 3: note = (S)-2-amino-4,4-dimethylpentanoic acid
  VARIANT 4: note = 2-amino-2-(pent-4-en-1-yl)hept-6-enoic acid, useful for stapling/stapled with another amino acid residue comprising an olefin group to form a staple through one of the two olefin groups and/or with another amino acid residue comprising an olefin group to form a staple through the other of the two olefin groups
  SITE 6: note = (S)-3-(2-amino-2-carboxyethyl)benzoic acid
  SITE 7: note = 2-amino-2-methylpropanoic acid
  SITE 10: note = L-lysine, useful for stapling/stapled with another amino acid residue comprising a side chain acid group to form a staple through the 6-amino group
  SITE 11: note (S)-3-amino-1-((pent-4-en-1-yloxy)carbonyl)pyrrolidine-3-ca rboxylic acid, useful for stapling/stapled with another amino acid residue comprising an olefin group to form a staple through the olefin group
  SITE 12: note (S)-2-amino-3-(2-(2-morpholinoacetamido)phenyl)propanoic acid
  SITE 13: note = (S)-2-amino-3-(benzo[b]thiophen-3-yl)propanoic acid
  SITE 14: note = L-glutamic acid, useful for stapling/stapled with another amino acid residue comprising a side chain amino group to form a staple through the 4-carboxyl group
  SITE 15: note = C-term amino
XDXXDXXAFKXXXEA

SEQ ID NO: 1333 - protein, 15 aa, synthetic construct
  SITE 1: note = N-term Acetic Acid
  SITE 1: note = (R)-2-allylpyrrolidine-2-carboxylic acid, useful for stapling/stapled with another amino acid residue comprising an olefin group to form a staple through the olefin group
  SITE 3: note = (S)-2-amino-4,4-dimethylpentanoic acid
  VARIANT 4: note = 2-amino-2-(pent-4-en-1-yl)hept-6-enoic acid, useful for stapling/stapled with another amino acid residue comprising an olefin group to form a staple through one of the two olefin groups and/or with another amino acid residue comprising an olefin group to form a staple through the other of the two olefin groups
  SITE 6: note = (S)-3-(2-amino-2-carboxyethyl)benzoic acid
  SITE 7: note = 2-amino-2-methylpropanoic acid
  SITE 10: note = L-lysine, useful for stapling/stapled with another amino acid residue comprising a side chain acid group to form a staple through the 6-amino group
  SITE 11: note (S)-3-amino-1-((pent-4-en-1-yloxy)carbonyl)pyrrolidine-3-ca rboxylic acid, useful for stapling/stapled with another amino acid residue comprising an olefin group to form a staple through the olefin group
  SITE 12: note = (S)-2-amino-3-(2-(nicotinamido)phenyl)propanoic acid
  SITE 13: note = (S)-2-amino-3-(benzo[b]thiophen-3-yl)propanoic acid
  SITE 14: note = L-glutamic acid, useful for stapling/stapled with another amino acid residue comprising a side chain amino group to form a staple through the 4-carboxyl group
  SITE 15: note = C-term amino
XDXXDXXAFKXXXEA

SEQ ID NO: 1334 - protein, 15 aa, synthetic construct
  SITE 1: note = N-term Acetic Acid
  SITE 1: note = (R)-2-allylpyrrolidine-2-carboxylic acid, useful for stapling/stapled with another amino acid residue comprising an olefin group to form a staple through the olefin group
  SITE 3: note = (S)-2-amino-4,4-dimethylpentanoic acid
  VARIANT 4: note = 2-amino-2-(pent-4-en-1-yl)hept-6-enoic acid, useful for stapling/stapled with another amino acid residue comprising an olefin group to form a staple through one of the two olefin groups and/or with another amino acid residue comprising an olefin group to form a staple through the other of the two olefin groups
  SITE 6: note = (S)-3-(2-amino-2-carboxyethyl)benzoic acid
  SITE 7: note = 2-amino-2-methylpropanoic acid
  SITE 10: note = L-lysine, useful for stapling/stapled with another amino acid residue comprising a side chain acid group to form a staple through the 6-amino group
  SITE 11: note (S)-3-amino-1-((pent-4-en-1-yloxy)carbonyl)pyrrolidine-3-ca rboxylic acid, useful for stapling/stapled with another amino acid residue comprising an olefin group to form a staple through the olefin group
  SITE 12: note (S)-2-amino-3-(2-(pyrazine-2-carboxamido)phenyl)propanoic acid
  SITE 13: note = (S)-2-amino-3-(benzo[b]thiophen-3-yl)propanoic acid
  SITE 14: note = L-glutamic acid, useful for stapling/stapled with another amino acid residue comprising a side chain amino group to form a staple through the 4-carboxyl group
  SITE 15: note = C-term amino
XDXXDXXAFKXXXEA

SEQ ID NO: 1335 - protein, 15 aa, synthetic construct
  SITE 1: note = N-term Acetic Acid
  SITE 1: note = (R)-2-allylpyrrolidine-2-carboxylic acid, useful for stapling/stapled with another amino acid residue comprising an olefin group to form a staple through the olefin group
  SITE 3: note = (S)-2-amino-4,4-dimethylpentanoic acid
  VARIANT 4: note = 2-amino-2-(pent-4-en-1-yl)hept-6-enoic acid, useful for stapling/stapled with another amino acid residue comprising an olefin group to form a staple through one of the two olefin groups and/or with another amino acid residue comprising an olefin group to form a staple through the other of the two olefin groups
  SITE 6: note = (S)-3-(2-amino-2-carboxyethyl)benzoic acid
  SITE 7: note = 2-amino-2-methylpropanoic acid
  SITE 10: note = L-lysine, useful for stapling/stapled with another amino acid residue comprising a side chain acid group to form a staple through the 6-amino group
  SITE 11: note (S)-3-amino-1-((pent-4-en-1-yloxy)carbonyl)pyrrolidine-3-ca rboxylic acid, useful for stapling/stapled with another amino acid residue comprising an olefin group to form a staple through the olefin group
  SITE 12: note (S)-2-amino-3-(2-(pyrimidine-5-carboxamido)phenyl)propanoic acid
  SITE 13: note = (S)-2-amino-3-(benzo[b]thiophen-3-yl)propanoic acid
  SITE 14: note = L-glutamic acid, useful for stapling/stapled with another amino acid residue comprising a side chain amino group to form a staple through the 4-carboxyl group
  SITE 15: note = C-term amino
XDXXDXXAFKXXXEA

SEQ ID NO: 1336 - protein, 14 aa, synthetic construct
  SITE 1: note = N-term Acetic Acid
  SITE 1: note = (R)-2-allylpyrrolidine-2-carboxylic acid, useful for stapling/stapled with another amino acid residue comprising an olefin group to form a staple through the olefin group
  VARIANT 4: note = 2-amino-2-(pent-4-en-1-yl)hept-6-enoic acid, useful for stapling/stapled with another amino acid residue comprising an olefin group to form a staple through one of the two olefin groups and/or with another amino acid residue comprising an olefin group to form a staple through the other of the two olefin groups
  SITE 6: note = (S)-3-(2-amino-2-carboxyethyl)benzoic acid
  SITE 7: note = 2-amino-2-methylpropanoic acid
  SITE 10: note = L-lysine, useful for stapling/stapled with another amino acid residue comprising a side chain acid group to form a staple through the 6-amino group
  SITE 11: note (S)-3-amino-1-((pent-4-en-1-yloxy)carbonyl)pyrrolidine-3-ca rboxylic acid, useful for stapling/stapled with another amino acid residue comprising an olefin group to form a staple through the olefin group
  SITE 13: note = (S)-2-amino-3-(3,4-dichlorophenyl)propanoic acid
  SITE 14: note = D-glutamic acid, useful for stapling/stapled with another amino acid residue comprising a side chain amino group to form a staple through the 4-carboxyl group
  SITE 14: note = C-term amino
XDIXDXXAFKXFXE

SEQ ID NO: 1337 - protein, 14 aa, synthetic construct
  SITE 1: note = N-term Acetic Acid
  SITE 1: note = (R)-2-allylpyrrolidine-2-carboxylic acid, useful for stapling/stapled with another amino acid residue comprising an olefin group to form a staple through the olefin group
  VARIANT 4: note = 2-amino-2-(pent-4-en-1-yl)hept-6-enoic acid, useful for stapling/stapled with another amino acid residue comprising an olefin group to form a staple through one of the two olefin groups and/or with another amino acid residue comprising an olefin group to form a staple through the other of the two olefin groups
  SITE 6: note = (S)-3-(2-amino-2-carboxyethyl)benzoic acid
  SITE 7: note = 2-amino-2-methylpropanoic acid
  SITE 10: note = L-lysine, useful for stapling/stapled with another amino acid residue comprising a side chain acid group to form a staple through the 6-amino group
  SITE 11: note (S)-3-amino-1-((pent-4-en-1-yloxy)carbonyl)pyrrolidine-3-ca rboxylic acid, useful for stapling/stapled with another amino acid residue comprising an olefin group to form a staple through the olefin group
  SITE 13: note = (S)-2-amino-3-(3,4-dichlorophenyl)propanoic acid
  SITE 14: note = D-glutamic acid, useful for stapling/stapled with another amino acid residue comprising a side chain amino group to form a staple through the 4-carboxyl group
  SITE 14: note = C-term methanamine
XDIXDXXAFKXFXE

SEQ ID NO: 1338 - protein, 15 aa, synthetic construct
  SITE 1: note = N-term Acetic Acid
  SITE 1: note = (R)-2-allylpyrrolidine-2-carboxylic acid, useful for stapling/stapled with another amino acid residue comprising an olefin group to form a staple through the olefin group
  VARIANT 4: note = 2-amino-2-(pent-4-en-1-yl)hept-6-enoic acid, useful for stapling/stapled with another amino acid residue comprising an olefin group to form a staple through one of the two olefin groups and/or with another amino acid residue comprising an olefin group to form a staple through the other of the two olefin groups
  SITE 6: note = (S)-3-(2-amino-2-carboxyethyl)benzoic acid
  SITE 7: note = 2-amino-2-methylpropanoic acid
  SITE 10: note = L-lysine, useful for stapling/stapled with another amino acid residue comprising a side chain acid group to form a staple through the 6-amino group
  SITE 11: note (S)-3-amino-1-((pent-4-en-1-yloxy)carbonyl)pyrrolidine-3-ca rboxylic acid, useful for stapling/stapled with another amino acid residue comprising an olefin group to form a staple through the olefin group
  SITE 13: note = (S)-2-amino-3-(3,4-dichlorophenyl)propanoic acid
  SITE 14: note = D-glutamic acid, useful for stapling/stapled with another amino acid residue comprising a side chain amino group to form a staple through the 4-carboxyl group
  SITE 15: note = C-term amino
XDIXDXXAFKXFXEA

SEQ ID NO: 1339 - protein, 14 aa, synthetic construct
  SITE 1: note = N-term Acetic Acid
  SITE 1: note = (R)-2-allylpyrrolidine-2-carboxylic acid, useful for stapling/stapled with another amino acid residue comprising an olefin group to form a staple through the olefin group
  VARIANT 4: note = 2-amino-2-(pent-4-en-1-yl)hept-6-enoic acid, useful for stapling/stapled with another amino acid residue comprising an olefin group to form a staple through one of the two olefin groups and/or with another amino acid residue comprising an olefin group to form a staple through the other of the two olefin groups
  SITE 6: note = (S)-3-(2-amino-2-carboxyethyl)benzoic acid
  SITE 7: note = 2-amino-2-methylpropanoic acid
  SITE 10: note = N6-methyl-L-lysine, useful for stapling/stapled with another amino acid residue comprising a side chain acid group to form a staple through the side chain amino group
  SITE 11: note (S)-3-amino-1-((pent-4-en-1-yloxy)carbonyl)pyrrolidine-3-ca rboxylic acid, useful for stapling/stapled with another amino acid residue comprising an olefin group to form a staple through the olefin group
  SITE 13: note = (S)-2-amino-3-(3,4-dichlorophenyl)propanoic acid
  SITE 14: note = D-glutamic acid, useful for stapling/stapled with another amino acid residue comprising a side chain amino group to form a staple through the 4-carboxyl group
  SITE 14: note = C-term amino
XDIXDXXAFKXFXE

SEQ ID NO: 1340 - protein, 14 aa, synthetic construct
  SITE 1: note = N-term Acetic Acid
  SITE 1: note = (R)-2-allylpyrrolidine-2-carboxylic acid, useful for stapling/stapled with another amino acid residue comprising an olefin group to form a staple through the olefin group
  VARIANT 4: note = 2-amino-2-(pent-4-en-1-yl)hept-6-enoic acid, useful for stapling/stapled with another amino acid residue comprising an olefin group to form a staple through one of the two olefin groups and/or with another amino acid residue comprising an olefin group to form a staple through the other of the two olefin groups
  SITE 6: note = (S)-3-(2-amino-2-carboxyethyl)benzoic acid
  SITE 7: note = 2-amino-2-methylpropanoic acid
  SITE 10: note = N6-methyl-L-lysine, useful for stapling/stapled with another amino acid residue comprising a side chain acid group to form a staple through the side chain amino group
  SITE 11: note (S)-3-amino-1-((pent-4-en-1-yloxy)carbonyl)pyrrolidine-3-ca rboxylic acid, useful for stapling/stapled with another amino acid residue comprising an olefin group to form a staple through the olefin group
  SITE 13: note = (S)-2-amino-3-(3,4-dichlorophenyl)propanoic acid
  SITE 14: note = D-glutamic acid, useful for stapling/stapled with another amino acid residue comprising a side chain amino group to form a staple through the 4-carboxyl group
  SITE 14: note = C-term methanamine
XDIXDXXAFKXFXE

SEQ ID NO: 1341 - protein, 15 aa, synthetic construct
  SITE 1: note = N-term Acetic Acid
  SITE 1: note = (R)-2-allylpyrrolidine-2-carboxylic acid, useful for stapling/stapled with another amino acid residue comprising an olefin group to form a staple through the olefin group
  VARIANT 4: note = 2-amino-2-(pent-4-en-1-yl)hept-6-enoic acid, useful for stapling/stapled with another amino acid residue comprising an olefin group to form a staple through one of the two olefin groups and/or with another amino acid residue comprising an olefin group to form a staple through the other of the two olefin groups
  SITE 6: note = (S)-3-(2-amino-2-carboxyethyl)benzoic acid
  SITE 7: note = 2-amino-2-methylpropanoic acid
  SITE 10: note = N6-methyl-L-lysine, useful for stapling/stapled with another amino acid residue comprising a side chain acid group to form a staple through the side chain amino group
  SITE 11: note (S)-3-amino-1-((pent-4-en-1-yloxy)carbonyl)pyrrolidine-3-ca rboxylic acid, useful for stapling/stapled with another amino acid residue comprising an olefin group to form a staple through the olefin group
  SITE 13: note = (S)-2-amino-3-(3,4-dichlorophenyl)propanoic acid
  SITE 14: note = D-glutamic acid, useful for stapling/stapled with another amino acid residue comprising a side chain amino group to form a staple through the 4-carboxyl group
  SITE 15: note = C-term amino
XDIXDXXAFKXFXEA

SEQ ID NO: 1342 - protein, 15 aa, synthetic construct
  SITE 1: note = N-term Acetic Acid
  SITE 1: note = (R)-2-allylpyrrolidine-2-carboxylic acid, useful for stapling/stapled with another amino acid residue comprising an olefin group to form a staple through the olefin group
  SITE 3: note = (S)-2-amino-4,4-dimethylpentanoic acid
  VARIANT 4: note = 2-amino-2-(pent-4-en-1-yl)hept-6-enoic acid, useful for stapling/stapled with another amino acid residue comprising an olefin group to form a staple through one of the two olefin groups and/or with another amino acid residue comprising an olefin group to form a staple through the other of the two olefin groups
  SITE 6: note = (S)-3-(2-amino-2-carboxyethyl)benzoic acid
  SITE 7: note = 2-amino-2-methylpropanoic acid
  SITE 10: note = L-lysine, useful for stapling/stapled with another amino acid residue comprising a side chain acid group to form a staple through the 6-amino group
  SITE 11: note (S)-3-amino-1-((pent-4-en-1-yloxy)carbonyl)pyrrolidine-3-ca rboxylic acid, useful for stapling/stapled with another amino acid residue comprising an olefin group to form a staple through the olefin group
  SITE 12: note (S)-2-amino-3-(2-(3-fluoropicolinamido)phenyl)propanoic acid
  SITE 13: note = (S)-2-amino-3-(benzo[b]thiophen-3-yl)propanoic acid
  SITE 14: note = L-glutamic acid, useful for stapling/stapled with another amino acid residue comprising a side chain amino group to form a staple through the 4-carboxyl group
  SITE 15: note = C-term amino
XDXXDXXAFKXXXEA

SEQ ID NO: 1343 - protein, 15 aa, synthetic construct
  SITE 1: note = N-term Acetic Acid
  SITE 1: note = (R)-2-allylpyrrolidine-2-carboxylic acid, useful for stapling/stapled with another amino acid residue comprising an olefin group to form a staple through the olefin group
  SITE 3: note = (S)-2-amino-4,4-dimethylpentanoic acid
  VARIANT 4: note = 2-amino-2-(pent-4-en-1-yl)hept-6-enoic acid, useful for stapling/stapled with another amino acid residue comprising an olefin group to form a staple through one of the two olefin groups and/or with another amino acid residue comprising an olefin group to form a staple through the other of the two olefin groups
  SITE 6: note = (S)-3-(2-amino-2-carboxyethyl)benzoic acid
  SITE 7: note = 2-amino-2-methylpropanoic acid
  SITE 10: note = L-lysine, useful for stapling/stapled with another amino acid residue comprising a side chain acid group to form a staple through the 6-amino group
  SITE 11: note (S)-3-amino-1-((pent-4-en-1-yloxy)carbonyl)pyrrolidine-3-ca rboxylic acid, useful for stapling/stapled with another amino acid residue comprising an olefin group to form a staple through the olefin group
  SITE 12: note (S)-2-amino-3-(2-(4-fluoronicotinamido)phenyl)propanoic acid
  SITE 13: note = (S)-2-amino-3-(benzo[b]thiophen-3-yl)propanoic acid
  SITE 14: note = L-glutamic acid, useful for stapling/stapled with another amino acid residue comprising a side chain amino group to form a staple through the 4-carboxyl group
  SITE 15: note = C-term amino
XDXXDXXAFKXXXEA

SEQ ID NO: 1344 - protein, 14 aa, synthetic construct
  SITE 1: note = N-term Acetic Acid
  SITE 1: note = (R)-2-allylpyrrolidine-2-carboxylic acid, useful for stapling/stapled with another amino acid residue comprising an olefin group to form a staple through the olefin group
  SITE 3: note = (S)-2-amino-3,3-diphenylpropanoic acid
  VARIANT 4: note = 2-amino-2-(pent-4-en-1-yl)hept-6-enoic acid, useful for stapling/stapled with another amino acid residue comprising an olefin group to form a staple through one of the two olefin groups and/or with another amino acid residue comprising an olefin group to form a staple through the other of the two olefin groups
  SITE 6: note = (S)-3-(2-amino-2-carboxyethyl)benzoic acid
  SITE 7: note = 1-aminocyclopentane-1-carboxylic acid
  SITE 10: note = L-lysine, useful for stapling/stapled with another amino acid residue comprising a side chain acid group to form a staple through the 6-amino group
  SITE 11: note (S)-3-amino-1-((pent-4-en-1-yloxy)carbonyl)pyrrolidine-3-ca rboxylic acid, useful for stapling/stapled with another amino acid residue comprising an olefin group to form a staple through the olefin group
  SITE 12: note = (S)-2-amino-3-(2-(trifluoromethyl)phenyl)propanoic acid
  SITE 13: note = (S)-2-amino-3-(benzo[b]thiophen-3-yl)propanoic acid
  SITE 14: note = L-glutamic acid, useful for stapling/stapled with another amino acid residue comprising a side chain amino group to form a staple through the 4-carboxyl group
  SITE 14: note = C-term amino
XDXXDXXAFKXXXE

SEQ ID NO: 1345 - protein, 15 aa, synthetic construct
  SITE 1: note = N-term Acetic Acid
  SITE 1: note = (R)-2-allylpyrrolidine-2-carboxylic acid, useful for stapling/stapled with another amino acid residue comprising an olefin group to form a staple through the olefin group
  SITE 3: note = (S)-2-amino-3,3-diphenylpropanoic acid
  VARIANT 4: note = 2-amino-2-(pent-4-en-1-yl)hept-6-enoic acid, useful for stapling/stapled with another amino acid residue comprising an olefin group to form a staple through one of the two olefin groups and/or with another amino acid residue comprising an olefin group to form a staple through the other of the two olefin groups
  SITE 6: note = (S)-3-(2-amino-2-carboxyethyl)benzoic acid
  SITE 7: note = 1-aminocyclopentane-1-carboxylic acid
  SITE 10: note = L-lysine, useful for stapling/stapled with another amino acid residue comprising a side chain acid group to form a staple through the 6-amino group
  SITE 11: note (S)-3-amino-1-((pent-4-en-1-yloxy)carbonyl)pyrrolidine-3-ca rboxylic acid, useful for stapling/stapled with another amino acid residue comprising an olefin group to form a staple through the olefin group
  SITE 12: note = (S)-2-amino-3-(2-(trifluoromethyl)phenyl)propanoic acid
  SITE 13: note = (S)-2-amino-3-(3,4-dichlorophenyl)propanoic acid
  SITE 14: note = L-glutamic acid, useful for stapling/stapled with another amino acid residue comprising a side chain amino group to form a staple through the 4-carboxyl group
  SITE 15: note = C-term amino
XDXXDXXAFKXXXEP

SEQ ID NO: 1346 - protein, 15 aa, synthetic construct
  SITE 1: note = N-term Acetic Acid
  SITE 1: note = (R)-2-allylpyrrolidine-2-carboxylic acid, useful for stapling/stapled with another amino acid residue comprising an olefin group to form a staple through the olefin group
  SITE 3: note = (S)-2-amino-3,3-diphenylpropanoic acid
  VARIANT 4: note = 2-amino-2-(pent-4-en-1-yl)hept-6-enoic acid, useful for stapling/stapled with another amino acid residue comprising an olefin group to form a staple through one of the two olefin groups and/or with another amino acid residue comprising an olefin group to form a staple through the other of the two olefin groups
  SITE 6: note = (S)-3-(2-amino-2-carboxyethyl)benzoic acid
  SITE 7: note = 1-aminocyclopentane-1-carboxylic acid
  SITE 10: note = L-lysine, useful for stapling/stapled with another amino acid residue comprising a side chain acid group to form a staple through the 6-amino group
  SITE 11: note (S)-3-amino-1-((pent-4-en-1-yloxy)carbonyl)pyrrolidine-3-ca rboxylic acid, useful for stapling/stapled with another amino acid residue comprising an olefin group to form a staple through the olefin group
  SITE 12: note = (S)-2-amino-3-(2-(trifluoromethyl)phenyl)propanoic acid
  SITE 13: note = (S)-2-amino-3-(benzo[b]thiophen-3-yl)propanoic acid
  SITE 14: note = L-glutamic acid, useful for stapling/stapled with another amino acid residue comprising a side chain amino group to form a staple through the 4-carboxyl group
  SITE 15: note = C-term amino
XDXXDXXAFKXXXEP

SEQ ID NO: 1347 - protein, 15 aa, synthetic construct
  SITE 1: note = N-term Acetic Acid
  SITE 1: note = (R)-2-allylpyrrolidine-2-carboxylic acid, useful for stapling/stapled with another amino acid residue comprising an olefin group to form a staple through the olefin group
  SITE 3: note = (S)-2-amino-3,3-diphenylpropanoic acid
  VARIANT 4: note = 2-amino-2-(pent-4-en-1-yl)hept-6-enoic acid, useful for stapling/stapled with another amino acid residue comprising an olefin group to form a staple through one of the two olefin groups and/or with another amino acid residue comprising an olefin group to form a staple through the other of the two olefin groups
  SITE 6: note = (S)-3-(2-amino-2-carboxyethyl)benzoic acid
  SITE 7: note = 1-aminocyclopentane-1-carboxylic acid
  SITE 10: note = L-lysine, useful for stapling/stapled with another amino acid residue comprising a side chain acid group to form a staple through the 6-amino group
  SITE 11: note (S)-3-amino-1-((pent-4-en-1-yloxy)carbonyl)pyrrolidine-3-ca rboxylic acid, useful for stapling/stapled with another amino acid residue comprising an olefin group to form a staple through the olefin group
  SITE 12: note = (S)-2-amino-3-(2-(trifluoromethyl)phenyl)propanoic acid
  SITE 13: note = (S)-2-amino-3-(3,4-dichlorophenyl)propanoic acid
  SITE 14: note = L-glutamic acid, useful for stapling/stapled with another amino acid residue comprising a side chain amino group to form a staple through the 4-carboxyl group
  SITE 15: note = C-term amino
XDXXDXXAFKXXXEL

SEQ ID NO: 1348 - protein, 15 aa, synthetic construct
  SITE 1: note = N-term Acetic Acid
  SITE 1: note = (R)-2-allylpyrrolidine-2-carboxylic acid, useful for stapling/stapled with another amino acid residue comprising an olefin group to form a staple through the olefin group
  SITE 3: note = (S)-2-amino-3,3-diphenylpropanoic acid
  VARIANT 4: note = 2-amino-2-(pent-4-en-1-yl)hept-6-enoic acid, useful for stapling/stapled with another amino acid residue comprising an olefin group to form a staple through one of the two olefin groups and/or with another amino acid residue comprising an olefin group to form a staple through the other of the two olefin groups
  SITE 6: note = (S)-3-(2-amino-2-carboxyethyl)benzoic acid
  SITE 7: note = 1-aminocyclopentane-1-carboxylic acid
  SITE 10: note = L-lysine, useful for stapling/stapled with another amino acid residue comprising a side chain acid group to form a staple through the 6-amino group
  SITE 11: note (S)-3-amino-1-((pent-4-en-1-yloxy)carbonyl)pyrrolidine-3-ca rboxylic acid, useful for stapling/stapled with another amino acid residue comprising an olefin group to form a staple through the olefin group
  SITE 12: note = (S)-2-amino-3-(2-(trifluoromethyl)phenyl)propanoic acid
  SITE 13: note = (S)-2-amino-3-(benzo[b]thiophen-3-yl)propanoic acid
  SITE 14: note = L-glutamic acid, useful for stapling/stapled with another amino acid residue comprising a side chain amino group to form a staple through the 4-carboxyl group
  SITE 15: note = C-term amino
XDXXDXXAFKXXXEL

SEQ ID NO: 1349 - protein, 15 aa, synthetic construct
  SITE 1: note = N-term Acetic Acid
  SITE 1: note = (R)-2-allylpyrrolidine-2-carboxylic acid, useful for stapling/stapled with another amino acid residue comprising an olefin group to form a staple through the olefin group
  SITE 3: note = (S)-2-amino-3,3-diphenylpropanoic acid
  VARIANT 4: note = 2-amino-2-(pent-4-en-1-yl)hept-6-enoic acid, useful for stapling/stapled with another amino acid residue comprising an olefin group to form a staple through one of the two olefin groups and/or with another amino acid residue comprising an olefin group to form a staple through the other of the two olefin groups
  SITE 6: note = (S)-3-(2-amino-2-carboxyethyl)benzoic acid
  SITE 7: note = 1-aminocyclopentane-1-carboxylic acid
  SITE 10: note = L-lysine, useful for stapling/stapled with another amino acid residue comprising a side chain acid group to form a staple through the 6-amino group
  SITE 11: note (S)-3-amino-1-((pent-4-en-1-yloxy)carbonyl)pyrrolidine-3-ca rboxylic acid, useful for stapling/stapled with another amino acid residue comprising an olefin group to form a staple through the olefin group
  SITE 12: note = (S)-2-amino-3-(2-(trifluoromethyl)phenyl)propanoic acid
  SITE 13: note = (S)-2-amino-3-(3,4-dichlorophenyl)propanoic acid
  SITE 14: note = L-glutamic acid, useful for stapling/stapled with another amino acid residue comprising a side chain amino group to form a staple through the 4-carboxyl group
  SITE 15: note = C-term amino
XDXXDXXAFKXXXES

SEQ ID NO: 1350 - protein, 15 aa, synthetic construct
  SITE 1: note = N-term Acetic Acid
  SITE 1: note = (R)-2-allylpyrrolidine-2-carboxylic acid, useful for stapling/stapled with another amino acid residue comprising an olefin group to form a staple through the olefin group
  SITE 3: note = (S)-2-amino-3,3-diphenylpropanoic acid
  VARIANT 4: note = 2-amino-2-(pent-4-en-1-yl)hept-6-enoic acid, useful for stapling/stapled with another amino acid residue comprising an olefin group to form a staple through one of the two olefin groups and/or with another amino acid residue comprising an olefin group to form a staple through the other of the two olefin groups
  SITE 6: note = (S)-3-(2-amino-2-carboxyethyl)benzoic acid
  SITE 7: note = 1-aminocyclopentane-1-carboxylic acid
  SITE 10: note = L-lysine, useful for stapling/stapled with another amino acid residue comprising a side chain acid group to form a staple through the 6-amino group
  SITE 11: note (S)-3-amino-1-((pent-4-en-1-yloxy)carbonyl)pyrrolidine-3-ca rboxylic acid, useful for stapling/stapled with another amino acid residue comprising an olefin group to form a staple through the olefin group
  SITE 12: note = (S)-2-amino-3-(2-(trifluoromethyl)phenyl)propanoic acid
  SITE 13: note = (S)-2-amino-3-(benzo[b]thiophen-3-yl)propanoic acid
  SITE 14: note = L-glutamic acid, useful for stapling/stapled with another amino acid residue comprising a side chain amino group to form a staple through the 4-carboxyl group
  SITE 15: note = C-term amino
XDXXDXXAFKXXXES

SEQ ID NO: 1351 - protein, 15 aa, synthetic construct
  SITE 1: note = N-term Acetic Acid
  SITE 1: note = (R)-2-allylpyrrolidine-2-carboxylic acid, useful for stapling/stapled with another amino acid residue comprising an olefin group to form a staple through the olefin group
  SITE 3: note = (S)-2-amino-3,3-diphenylpropanoic acid
  VARIANT 4: note = 2-amino-2-(pent-4-en-1-yl)hept-6-enoic acid, useful for stapling/stapled with another amino acid residue comprising an olefin group to form a staple through one of the two olefin groups and/or with another amino acid residue comprising an olefin group to form a staple through the other of the two olefin groups
  SITE 6: note = (S)-3-(2-amino-2-carboxyethyl)benzoic acid
  SITE 7: note = 1-aminocyclopentane-1-carboxylic acid
  SITE 10: note = L-lysine, useful for stapling/stapled with another amino acid residue comprising a side chain acid group to form a staple through the 6-amino group
  SITE 11: note (S)-3-amino-1-((pent-4-en-1-yloxy)carbonyl)pyrrolidine-3-ca rboxylic acid, useful for stapling/stapled with another amino acid residue comprising an olefin group to form a staple through the olefin group
  SITE 12: note = (S)-2-amino-3-(2-(trifluoromethyl)phenyl)propanoic acid
  SITE 13: note = (S)-2-amino-3-(3,4-dichlorophenyl)propanoic acid
  SITE 14: note = L-glutamic acid, useful for stapling/stapled with another amino acid residue comprising a side chain amino group to form a staple through the 4-carboxyl group
  SITE 15: note = C-term amino
XDXXDXXAFKXXXEV

SEQ ID NO: 1352 - protein, 15 aa, synthetic construct
  SITE 1: note = N-term Acetic Acid
  SITE 1: note = (R)-2-allylpyrrolidine-2-carboxylic acid, useful for stapling/stapled with another amino acid residue comprising an olefin group to form a staple through the olefin group
  SITE 3: note = (S)-2-amino-3,3-diphenylpropanoic acid
  VARIANT 4: note = 2-amino-2-(pent-4-en-1-yl)hept-6-enoic acid, useful for stapling/stapled with another amino acid residue comprising an olefin group to form a staple through one of the two olefin groups and/or with another amino acid residue comprising an olefin group to form a staple through the other of the two olefin groups
  SITE 6: note = (S)-3-(2-amino-2-carboxyethyl)benzoic acid
  SITE 7: note = 1-aminocyclopentane-1-carboxylic acid
  SITE 10: note = L-lysine, useful for stapling/stapled with another amino acid residue comprising a side chain acid group to form a staple through the 6-amino group
  SITE 11: note (S)-3-amino-1-((pent-4-en-1-yloxy)carbonyl)pyrrolidine-3-ca rboxylic acid, useful for stapling/stapled with another amino acid residue comprising an olefin group to form a staple through the olefin group
  SITE 12: note = (S)-2-amino-3-(2-(trifluoromethyl)phenyl)propanoic acid
  SITE 13: note = (S)-2-amino-3-(benzo[b]thiophen-3-yl)propanoic acid
  SITE 14: note = L-glutamic acid, useful for stapling/stapled with another amino acid residue comprising a side chain amino group to form a staple through the 4-carboxyl group
  SITE 15: note = C-term amino
XDXXDXXAFKXXXEV

SEQ ID NO: 1353 - protein, 15 aa, synthetic construct
  SITE 1: note = N-term Acetic Acid
  SITE 1: note = (R)-2-allylpyrrolidine-2-carboxylic acid, useful for stapling/stapled with another amino acid residue comprising an olefin group to form a staple through the olefin group
  SITE 3: note = (S)-2-amino-3,3-diphenylpropanoic acid
  VARIANT 4: note = 2-amino-2-(pent-4-en-1-yl)hept-6-enoic acid, useful for stapling/stapled with another amino acid residue comprising an olefin group to form a staple through one of the two olefin groups and/or with another amino acid residue comprising an olefin group to form a staple through the other of the two olefin groups
  SITE 6: note = (S)-3-(2-amino-2-carboxyethyl)benzoic acid
  SITE 7: note = 1-aminocyclopentane-1-carboxylic acid
  SITE 10: note = L-lysine, useful for stapling/stapled with another amino acid residue comprising a side chain acid group to form a staple through the 6-amino group
  SITE 11: note (S)-3-amino-1-((pent-4-en-1-yloxy)carbonyl)pyrrolidine-3-ca rboxylic acid, useful for stapling/stapled with another amino acid residue comprising an olefin group to form a staple through the olefin group
  SITE 12: note = (S)-2-amino-3-(2-(trifluoromethyl)phenyl)propanoic acid
  SITE 13: note = (S)-2-amino-3-(3,4-dichlorophenyl)propanoic acid
  SITE 14: note = L-glutamic acid, useful for stapling/stapled with another amino acid residue comprising a side chain amino group to form a staple through the 4-carboxyl group
  SITE 15: note = C-term amino
XDXXDXXAFKXXXEF

SEQ ID NO: 1354 - protein, 15 aa, synthetic construct
  SITE 1: note = N-term Acetic Acid
  SITE 1: note = (R)-2-allylpyrrolidine-2-carboxylic acid, useful for stapling/stapled with another amino acid residue comprising an olefin group to form a staple through the olefin group
  SITE 3: note = (S)-2-amino-3,3-diphenylpropanoic acid
  VARIANT 4: note = 2-amino-2-(pent-4-en-1-yl)hept-6-enoic acid, useful for stapling/stapled with another amino acid residue comprising an olefin group to form a staple through one of the two olefin groups and/or with another amino acid residue comprising an olefin group to form a staple through the other of the two olefin groups
  SITE 6: note = (S)-3-(2-amino-2-carboxyethyl)benzoic acid
  SITE 7: note = 1-aminocyclopentane-1-carboxylic acid
  SITE 10: note = L-lysine, useful for stapling/stapled with another amino acid residue comprising a side chain acid group to form a staple through the 6-amino group
  SITE 11: note (S)-3-amino-1-((pent-4-en-1-yloxy)carbonyl)pyrrolidine-3-ca rboxylic acid, useful for stapling/stapled with another amino acid residue comprising an olefin group to form a staple through the olefin group
  SITE 12: note = (S)-2-amino-3-(2-(trifluoromethyl)phenyl)propanoic acid
  SITE 13: note = (S)-2-amino-3-(benzo[b]thiophen-3-yl)propanoic acid
  SITE 14: note = L-glutamic acid, useful for stapling/stapled with another amino acid residue comprising a side chain amino group to form a staple through the 4-carboxyl group
  SITE 15: note = C-term amino
XDXXDXXAFKXXXEF

SEQ ID NO: 1355 - protein, 15 aa, synthetic construct
  SITE 1: note = N-term Acetic Acid
  SITE 1: note = (R)-2-allylpyrrolidine-2-carboxylic acid, useful for stapling/stapled with another amino acid residue comprising an olefin group to form a staple through the olefin group
  VARIANT 4: note = 2-amino-2-(pent-4-en-1-yl)hept-6-enoic acid, useful for stapling/stapled with another amino acid residue comprising an olefin group to form a staple through one of the two olefin groups and/or with another amino acid residue comprising an olefin group to form a staple through the other of the two olefin groups
  SITE 6: note = (S)-3-(2-amino-2-carboxyethyl)benzoic acid
  SITE 7: note = 2-amino-2-methylpropanoic acid
  SITE 10: note = L-glutamic acid, useful for stapling/stapled with another amino acid residue comprising a side chain amino group to form a staple through the 4-carboxyl group
  SITE 11: note (S)-3-amino-1-((pent-4-en-1-yloxy)carbonyl)pyrrolidine-3-ca rboxylic acid, useful for stapling/stapled with another amino acid residue comprising an olefin group to form a staple through the olefin group
  SITE 13: note = (S)-2-amino-3-(3,4-dichlorophenyl)propanoic acid
  SITE 14: note = D-lysine, useful for stapling/stapled with another amino acid residue comprising a side chain acid group to form a staple through the 6-amino group
  SITE 15: note = C-term amino
XDIXDXXAFEXFXKA

SEQ ID NO: 1356 - protein, 14 aa, synthetic construct
  SITE 1: note = N-term Acetic Acid
  SITE 1: note = (R)-2-allylpyrrolidine-2-carboxylic acid, useful for stapling/stapled with another amino acid residue comprising an olefin group to form a staple through the olefin group
  VARIANT 4: note = 2-amino-2-(pent-4-en-1-yl)hept-6-enoic acid, useful for stapling/stapled with another amino acid residue comprising an olefin group to form a staple through one of the two olefin groups and/or with another amino acid residue comprising an olefin group to form a staple through the other of the two olefin groups
  SITE 6: note = (S)-3-(2-amino-2-carboxyethyl)benzoic acid
  SITE 7: note = 2-amino-2-methylpropanoic acid
  SITE 10: note = (S)-2,5-diaminopentanoic acid, useful for stapling/stapled with another amino acid residue comprising a side chain acid group to form a staple through the 5-amino group
  SITE 11: note (S)-3-amino-1-((pent-4-en-1-yloxy)carbonyl)pyrrolidine-3-ca rboxylic acid, useful for stapling/stapled with another amino acid residue comprising an olefin group to form a staple through the olefin group
  SITE 13: note = (S)-2-amino-3-(3,4-dichlorophenyl)propanoic acid
  SITE 14: note = D-glutamic acid, useful for stapling/stapled with another amino acid residue comprising a side chain amino group to form a staple through the 4-carboxyl group
  SITE 14: note = C-term amino
XDIXDXXAFXXFXE

SEQ ID NO: 1357 - protein, 14 aa, synthetic construct
  SITE 1: note = N-term Acetic Acid
  SITE 1: note = (R)-2-allylpyrrolidine-2-carboxylic acid, useful for stapling/stapled with another amino acid residue comprising an olefin group to form a staple through the olefin group
  VARIANT 4: note = 2-amino-2-(pent-4-en-1-yl)hept-6-enoic acid, useful for stapling/stapled with another amino acid residue comprising an olefin group to form a staple through one of the two olefin groups and/or with another amino acid residue comprising an olefin group to form a staple through the other of the two olefin groups
  SITE 6: note = (S)-3-(2-amino-2-carboxyethyl)benzoic acid
  SITE 7: note = 2-amino-2-methylpropanoic acid
  SITE 10: note = (S)-2,5-diaminopentanoic acid, useful for stapling/stapled with another amino acid residue comprising a side chain acid group to form a staple through the 5-amino group
  SITE 11: note (S)-3-amino-1-((pent-4-en-1-yloxy)carbonyl)pyrrolidine-3-ca rboxylic acid, useful for stapling/stapled with another amino acid residue comprising an olefin group to form a staple through the olefin group
  SITE 13: note = (S)-2-amino-3-(3,4-dichlorophenyl)propanoic acid
  SITE 14: note = D-glutamic acid, useful for stapling/stapled with another amino acid residue comprising a side chain amino group to form a staple through the 4-carboxyl group
  SITE 14: note = C-term methanamine
XDIXDXXAFXXFXE

SEQ ID NO: 1358 - protein, 15 aa, synthetic construct
  SITE 1: note = N-term Acetic Acid
  SITE 1: note = (R)-2-allylpyrrolidine-2-carboxylic acid, useful for stapling/stapled with another amino acid residue comprising an olefin group to form a staple through the olefin group
  VARIANT 4: note = 2-amino-2-(pent-4-en-1-yl)hept-6-enoic acid, useful for stapling/stapled with another amino acid residue comprising an olefin group to form a staple through one of the two olefin groups and/or with another amino acid residue comprising an olefin group to form a staple through the other of the two olefin groups
  SITE 6: note = (S)-3-(2-amino-2-carboxyethyl)benzoic acid
  SITE 7: note = 2-amino-2-methylpropanoic acid
  SITE 10: note = (S)-2,5-diaminopentanoic acid, useful for stapling/stapled with another amino acid residue comprising a side chain acid group to form a staple through the 5-amino group
  SITE 11: note (S)-3-amino-1-((pent-4-en-1-yloxy)carbonyl)pyrrolidine-3-ca rboxylic acid, useful for stapling/stapled with another amino acid residue comprising an olefin group to form a staple through the olefin group
  SITE 13: note = (S)-2-amino-3-(3,4-dichlorophenyl)propanoic acid
  SITE 14: note = D-glutamic acid, useful for stapling/stapled with another amino acid residue comprising a side chain amino group to form a staple through the 4-carboxyl group
  SITE 15: note = C-term amino
XDIXDXXAFXXFXEA

SEQ ID NO: 1359 - protein, 15 aa, synthetic construct
  SITE 1: note = N-term Acetic Acid
  SITE 1: note = (S)-2-amino-2-methyloct-7-enoic acid, useful for stapling/stapled with another amino acid residue comprising an olefin group to form a staple through the olefin group
  SITE 4: note = (S)-2-amino-3,3-diphenylpropanoic acid
  VARIANT 5: note = 2-amino-2-(pent-4-en-1-yl)hept-6-enoic acid, useful for stapling/stapled with another amino acid residue comprising an olefin group to form a staple through one of the two olefin groups and/or with another amino acid residue comprising an olefin group to form a staple through the other of the two olefin groups
  SITE 7: note = (S)-3-(2-amino-2-carboxyethyl)benzoic acid
  SITE 8: note = 2-amino-2-methylpropanoic acid
  SITE 11: note = L-lysine, useful for stapling/stapled with another amino acid residue comprising a side chain acid group to form a staple through the 6-amino group
  SITE 12: note (S)-3-amino-1-((but-3-en-1-yloxy)carbonyl)pyrrolidine-3-car boxylic acid, useful for stapling/stapled with another amino acid residue comprising an olefin group to form a staple through the olefin group
  SITE 14: note = (S)-2-amino-3-(3,4-dichlorophenyl)propanoic acid
  SITE 15: note = L-glutamic acid, useful for stapling/stapled with another amino acid residue comprising a side chain amino group to form a staple through the 4-carboxyl group
  SITE 15: note = C-term amino
XVDXXDXXAFKXFXE

SEQ ID NO: 1360 - protein, 15 aa, synthetic construct
  SITE 1: note = N-term Acetic Acid
  SITE 1: note = (S)-2-amino-2-methylhept-6-enoic acid, useful for stapling/stapled with another amino acid residue comprising an olefin group to form a staple through the olefin group
  SITE 4: note = (S)-2-amino-3,3-diphenylpropanoic acid
  VARIANT 5: note = 2-amino-2-(pent-4-en-1-yl)hept-6-enoic acid, useful for stapling/stapled with another amino acid residue comprising an olefin group to form a staple through one of the two olefin groups and/or with another amino acid residue comprising an olefin group to form a staple through the other of the two olefin groups
  SITE 7: note = (S)-3-(2-amino-2-carboxyethyl)benzoic acid
  SITE 8: note = 2-amino-2-methylpropanoic acid
  SITE 11: note = L-lysine, useful for stapling/stapled with another amino acid residue comprising a side chain acid group to form a staple through the 6-amino group
  SITE 12: note (S)-3-amino-1-((but-3-en-1-yloxy)carbonyl)pyrrolidine-3-car boxylic acid, useful for stapling/stapled with another amino acid residue comprising an olefin group to form a staple through the olefin group
  SITE 14: note = (S)-2-amino-3-(3,4-dichlorophenyl)propanoic acid
  SITE 15: note = L-glutamic acid, useful for stapling/stapled with another amino acid residue comprising a side chain amino group to form a staple through the 4-carboxyl group
  SITE 15: note = C-term amino
XEDXXDXXAFKXFXE

SEQ ID NO: 1361 - protein, 15 aa, synthetic construct
  SITE 1: note = N-term Acetic Acid
  SITE 1: note = (S)-2-amino-2-methylhept-6-enoic acid, useful for stapling/stapled with another amino acid residue comprising an olefin group to form a staple through the olefin group
  SITE 4: note = (S)-2-amino-3,3-diphenylpropanoic acid
  VARIANT 5: note = 2-amino-2-(pent-4-en-1-yl)hept-6-enoic acid, useful for stapling/stapled with another amino acid residue comprising an olefin group to form a staple through one of the two olefin groups and/or with another amino acid residue comprising an olefin group to form a staple through the other of the two olefin groups
  SITE 7: note = (S)-3-(2-amino-2-carboxyethyl)benzoic acid
  SITE 8: note = 2-amino-2-methylpropanoic acid
  SITE 11: note = L-lysine, useful for stapling/stapled with another amino acid residue comprising a side chain acid group to form a staple through the 6-amino group
  SITE 12: note (S)-3-amino-1-((but-3-en-1-yloxy)carbonyl)pyrrolidine-3-car boxylic acid, useful for stapling/stapled with another amino acid residue comprising an olefin group to form a staple through the olefin group
  SITE 14: note = (S)-2-amino-3-(3,4-dichlorophenyl)propanoic acid
  SITE 15: note = L-glutamic acid, useful for stapling/stapled with another amino acid residue comprising a side chain amino group to form a staple through the 4-carboxyl group
  SITE 15: note = C-term amino
XLDXXDXXAFKXFXE

SEQ ID NO: 1362 - protein, 15 aa, synthetic construct
  SITE 1: note = N-term Acetic Acid
  SITE 1: note = (R)-2-allylpyrrolidine-2-carboxylic acid, useful for stapling/stapled with another amino acid residue comprising an olefin group to form a staple through the olefin group
  VARIANT 4: note = 2-amino-2-(pent-4-en-1-yl)hept-6-enoic acid, useful for stapling/stapled with another amino acid residue comprising an olefin group to form a staple through one of the two olefin groups and/or with another amino acid residue comprising an olefin group to form a staple through the other of the two olefin groups
  SITE 6: note = N5,N5-dimethyl-L-glutamine
  SITE 7: note = 2-amino-2-methylpropanoic acid
  SITE 10: note = L-lysine, useful for stapling/stapled with another amino acid residue comprising a side chain acid group to form a staple through the 6-amino group
  SITE 11: note (S)-3-amino-1-((pent-4-en-1-yloxy)carbonyl)pyrrolidine-3-ca rboxylic acid, useful for stapling/stapled with another amino acid residue comprising an olefin group to form a staple through the olefin group
  SITE 13: note = (S)-2-amino-3-(3,4-dichlorophenyl)propanoic acid
  SITE 14: note = L-glutamic acid, useful for stapling/stapled with another amino acid residue comprising a side chain amino group to form a staple through the 4-carboxyl group
  SITE 15: note = C-term amino
XDIXDQXAFKXFXEA

SEQ ID NO: 1363 - protein, 17 aa, synthetic construct
  SITE 1: note = N-term Acetic Acid
  SITE 1: note = (R)-2-allylpyrrolidine-2-carboxylic acid, useful for stapling/stapled with another amino acid residue comprising an olefin group to form a staple through the olefin group
  SITE 3: note = (S)-2-amino-3,3-diphenylpropanoic acid
  VARIANT 4: note = 2-amino-2-(pent-4-en-1-yl)hept-6-enoic acid, useful for stapling/stapled with another amino acid residue comprising an olefin group to form a staple through one of the two olefin groups and/or with another amino acid residue comprising an olefin group to form a staple through the other of the two olefin groups
  SITE 6: note = (S)-3-(2-amino-2-carboxyethyl)benzoic acid
  SITE 10: note = L-lysine, useful for stapling/stapled with another amino acid residue comprising a side chain acid group to form a staple through the 6-amino group
  SITE 11: note (S)-3-amino-1-((pent-4-en-1-yloxy)carbonyl)pyrrolidine-3-ca rboxylic acid, useful for stapling/stapled with another amino acid residue comprising an olefin group to form a staple through the olefin group
  SITE 12: note = (S)-2-amino-3-(thiophen-3-yl)propanoic acid
  SITE 13: note = (S)-2-amino-3-(3,4-dichlorophenyl)propanoic acid
  SITE 14: note = L-glutamic acid, useful for stapling/stapled with another amino acid residue comprising a side chain amino group to form a staple through the 4-carboxyl group
  SITE 17: note (S)-18-amino-2,12-dioxo-6,9-dioxa-3,13-diazanonadecan-19-oi c acid
  SITE 17: note = C-term amino
XDXXDXAAFKXXXEAAX

SEQ ID NO: 1364 - protein, 17 aa, synthetic construct
  SITE 1: note = N-term Acetic Acid
  SITE 1: note = (R)-2-allylpyrrolidine-2-carboxylic acid, useful for stapling/stapled with another amino acid residue comprising an olefin group to form a staple through the olefin group
  SITE 3: note = (S)-2-amino-3,3-diphenylpropanoic acid
  VARIANT 4: note = 2-amino-2-(pent-4-en-1-yl)hept-6-enoic acid, useful for stapling/stapled with another amino acid residue comprising an olefin group to form a staple through one of the two olefin groups and/or with another amino acid residue comprising an olefin group to form a staple through the other of the two olefin groups
  SITE 6: note = (S)-3-(2-amino-2-carboxyethyl)benzoic acid
  SITE 10: note = L-lysine, useful for stapling/stapled with another amino acid residue comprising a side chain acid group to form a staple through the 6-amino group
  SITE 11: note (S)-3-amino-1-((pent-4-en-1-yloxy)carbonyl)pyrrolidine-3-ca rboxylic acid, useful for stapling/stapled with another amino acid residue comprising an olefin group to form a staple through the olefin group
  SITE 12: note = (S)-2-amino-3-(thiophen-3-yl)propanoic acid
  SITE 13: note = (S)-2-amino-3-(3,4-dichlorophenyl)propanoic acid
  SITE 14: note = L-glutamic acid, useful for stapling/stapled with another amino acid residue comprising a side chain amino group to form a staple through the 4-carboxyl group
  SITE 17: note (S)-36-amino-2,30-dioxo-6,9,12,15,18,21,24,27-octaoxa-3,31- diazaheptatriacontan-37-oic acid
  SITE 17: note = C-term amino
XDXXDXAAFKXXXEAAX

SEQ ID NO: 1365 - protein, 17 aa, synthetic construct
  SITE 1: note = N-term Acetic Acid
  SITE 1: note = (R)-2-allylpyrrolidine-2-carboxylic acid, useful for stapling/stapled with another amino acid residue comprising an olefin group to form a staple through the olefin group
  SITE 3: note = (S)-2-amino-3,3-diphenylpropanoic acid
  VARIANT 4: note = 2-amino-2-(pent-4-en-1-yl)hept-6-enoic acid, useful for stapling/stapled with another amino acid residue comprising an olefin group to form a staple through one of the two olefin groups and/or with another amino acid residue comprising an olefin group to form a staple through the other of the two olefin groups
  SITE 6: note = (S)-3-(2-amino-2-carboxyethyl)benzoic acid
  SITE 10: note = L-lysine, useful for stapling/stapled with another amino acid residue comprising a side chain acid group to form a staple through the 6-amino group
  SITE 11: note (S)-3-amino-1-((pent-4-en-1-yloxy)carbonyl)pyrrolidine-3-ca rboxylic acid, useful for stapling/stapled with another amino acid residue comprising an olefin group to form a staple through the olefin group
  SITE 12: note = (S)-2-amino-3-(thiophen-3-yl)propanoic acid
  SITE 13: note = (S)-2-amino-3-(3,4-dichlorophenyl)propanoic acid
  SITE 14: note = L-glutamic acid, useful for stapling/stapled with another amino acid residue comprising a side chain amino group to form a staple through the 4-carboxyl group
  SITE 17: note (S)-2-amino-8,18-dioxo-11,14-dioxa-7,17-diazapentacosanoic acid
  SITE 17: note = C-term amino
XDXXDXAAFKXXXEAAX

SEQ ID NO: 1366 - protein, 17 aa, synthetic construct
  SITE 1: note = N-term Acetic Acid
  SITE 1: note = (R)-2-allylpyrrolidine-2-carboxylic acid, useful for stapling/stapled with another amino acid residue comprising an olefin group to form a staple through the olefin group
  SITE 3: note = (S)-2-amino-3,3-diphenylpropanoic acid
  VARIANT 4: note = 2-amino-2-(pent-4-en-1-yl)hept-6-enoic acid, useful for stapling/stapled with another amino acid residue comprising an olefin group to form a staple through one of the two olefin groups and/or with another amino acid residue comprising an olefin group to form a staple through the other of the two olefin groups
  SITE 6: note = (S)-3-(2-amino-2-carboxyethyl)benzoic acid
  SITE 10: note = L-lysine, useful for stapling/stapled with another amino acid residue comprising a side chain acid group to form a staple through the 6-amino group
  SITE 11: note (S)-3-amino-1-((pent-4-en-1-yloxy)carbonyl)pyrrolidine-3-ca rboxylic acid, useful for stapling/stapled with another amino acid residue comprising an olefin group to form a staple through the olefin group
  SITE 12: note = (S)-2-amino-3-(thiophen-3-yl)propanoic acid
  SITE 13: note = (S)-2-amino-3-(3,4-dichlorophenyl)propanoic acid
  SITE 14: note = L-glutamic acid, useful for stapling/stapled with another amino acid residue comprising a side chain amino group to form a staple through the 4-carboxyl group
  SITE 17: note (S)-2-amino-8,36-dioxo-11,14,17,20,23,26,29,32-octaoxa-7,35 - diazatritetracontanoic acid
  SITE 17: note = C-term amino
XDXXDXAAFKXXXEAAX

SEQ ID NO: 1367 - protein, 17 aa, synthetic construct
  SITE 1: note = N-term Acetic Acid
  SITE 1: note = (R)-2-allylpyrrolidine-2-carboxylic acid, useful for stapling/stapled with another amino acid residue comprising an olefin group to form a staple through the olefin group
  SITE 3: note = (S)-2-amino-3,3-diphenylpropanoic acid
  VARIANT 4: note = 2-amino-2-(pent-4-en-1-yl)hept-6-enoic acid, useful for stapling/stapled with another amino acid residue comprising an olefin group to form a staple through one of the two olefin groups and/or with another amino acid residue comprising an olefin group to form a staple through the other of the two olefin groups
  SITE 6: note = (S)-3-(2-amino-2-carboxyethyl)benzoic acid
  SITE 10: note = L-lysine, useful for stapling/stapled with another amino acid residue comprising a side chain acid group to form a staple through the 6-amino group
  SITE 11: note (S)-3-amino-1-((pent-4-en-1-yloxy)carbonyl)pyrrolidine-3-ca rboxylic acid, useful for stapling/stapled with another amino acid residue comprising an olefin group to form a staple through the olefin group
  SITE 12: note = (S)-2-amino-3-(thiophen-3-yl)propanoic acid
  SITE 13: note = (S)-2-amino-3-(3,4-dichlorophenyl)propanoic acid
  SITE 14: note = L-glutamic acid, useful for stapling/stapled with another amino acid residue comprising a side chain amino group to form a staple through the 4-carboxyl group
  SITE 17: note (S)-2-amino-8,18-dioxo-11,14-dioxa-7,17-diazapentatriaconta noic acid
  SITE 17: note = C-term amino
XDXXDXAAFKXXXEAAX

SEQ ID NO: 1368 - protein, 17 aa, synthetic construct
  SITE 1: note = N-term Acetic Acid
  SITE 1: note = (R)-2-allylpyrrolidine-2-carboxylic acid, useful for stapling/stapled with another amino acid residue comprising an olefin group to form a staple through the olefin group
  SITE 3: note = (S)-2-amino-3,3-diphenylpropanoic acid
  VARIANT 4: note = 2-amino-2-(pent-4-en-1-yl)hept-6-enoic acid, useful for stapling/stapled with another amino acid residue comprising an olefin group to form a staple through one of the two olefin groups and/or with another amino acid residue comprising an olefin group to form a staple through the other of the two olefin groups
  SITE 6: note = (S)-3-(2-amino-2-carboxyethyl)benzoic acid
  SITE 10: note = L-lysine, useful for stapling/stapled with another amino acid residue comprising a side chain acid group to form a staple through the 6-amino group
  SITE 11: note (S)-3-amino-1-((pent-4-en-1-yloxy)carbonyl)pyrrolidine-3-ca rboxylic acid, useful for stapling/stapled with another amino acid residue comprising an olefin group to form a staple through the olefin group
  SITE 12: note = (S)-2-amino-3-(thiophen-3-yl)propanoic acid
  SITE 13: note = (S)-2-amino-3-(3,4-dichlorophenyl)propanoic acid
  SITE 14: note = L-glutamic acid, useful for stapling/stapled with another amino acid residue comprising a side chain amino group to form a staple through the 4-carboxyl group
  SITE 17: note (S)-2-amino-8,36-dioxo-11,14,17,20,23,26,29,32-octaoxa-7,35 - diazatripentacontanoic acid
  SITE 17: note = C-term amino
XDXXDXAAFKXXXEAAX

SEQ ID NO: 1369 - protein, 14 aa, synthetic construct
  SITE 1: note = N-term Acetic Acid
  SITE 1: note = (R)-2-allylpyrrolidine-2-carboxylic acid, useful for stapling/stapled with another amino acid residue comprising an olefin group to form a staple through the olefin group
  VARIANT 4: note = 2-amino-2-(pent-4-en-1-yl)hept-6-enoic acid, useful for stapling/stapled with another amino acid residue comprising an olefin group to form a staple through one of the two olefin groups and/or with another amino acid residue comprising an olefin group to form a staple through the other of the two olefin groups
  SITE 6: note = (S)-3-(2-amino-2-carboxyethyl)benzoic acid
  SITE 7: note = N5-(3-aminopropyl)-L-glutamine, useful for stapling/stapled with another amino acid residue comprising a side chain acid group to form a staple through the amino group in the side chain
  SITE 11: note (S)-3-amino-1-((pent-4-en-1-yloxy)carbonyl)pyrrolidine-3-ca rboxylic acid, useful for stapling/stapled with another amino acid residue comprising an olefin group to form a staple through the olefin group
  SITE 13: note = (S)-2-amino-3-(3,4-dichlorophenyl)propanoic acid
  SITE 14: note = L-glutamic acid, useful for stapling/stapled with another amino acid residue comprising a side chain amino group to form a staple through the 4-carboxyl group
  SITE 14: note = C-term amino
XDIXDXXAFLXFXE

SEQ ID NO: 1370 - protein, 14 aa, synthetic construct
  SITE 1: note = N-term Acetic Acid
  SITE 1: note = (R)-2-allylpyrrolidine-2-carboxylic acid, useful for stapling/stapled with another amino acid residue comprising an olefin group to form a staple through the olefin group
  VARIANT 4: note = 2-amino-2-(pent-4-en-1-yl)hept-6-enoic acid, useful for stapling/stapled with another amino acid residue comprising an olefin group to form a staple through one of the two olefin groups and/or with another amino acid residue comprising an olefin group to form a staple through the other of the two olefin groups
  SITE 6: note = (S)-3-(2-amino-2-carboxyethyl)benzoic acid
  SITE 7: note = N5-(3-aminopropyl)-L-glutamine, useful for stapling/stapled with another amino acid residue comprising a side chain acid group to form a staple through the amino group in the side chain
  SITE 11: note (S)-3-amino-1-((pent-4-en-1-yloxy)carbonyl)pyrrolidine-3-ca rboxylic acid, useful for stapling/stapled with another amino acid residue comprising an olefin group to form a staple through the olefin group
  SITE 13: note = (S)-2-amino-3-(3,4-dichlorophenyl)propanoic acid
  SITE 14: note = L-glutamic acid, useful for stapling/stapled with another amino acid residue comprising a side chain amino group to form a staple through the 4-carboxyl group
  SITE 14: note = C-term amino
XDIXDXXAFAXFXE

SEQ ID NO: 1371 - protein, 14 aa, synthetic construct
  SITE 1: note = N-term Acetic Acid
  SITE 1: note = (R)-2-allylpyrrolidine-2-carboxylic acid, useful for stapling/stapled with another amino acid residue comprising an olefin group to form a staple through the olefin group
  VARIANT 4: note = 2-amino-2-(pent-4-en-1-yl)hept-6-enoic acid, useful for stapling/stapled with another amino acid residue comprising an olefin group to form a staple through one of the two olefin groups and/or with another amino acid residue comprising an olefin group to form a staple through the other of the two olefin groups
  SITE 6: note = (S)-3-(2-amino-2-carboxyethyl)benzoic acid
  SITE 7: note = N5-(3-aminopropyl)-L-glutamine, useful for stapling/stapled with another amino acid residue comprising a side chain acid group to form a staple through the amino group in the side chain
  SITE 11: note (S)-3-amino-1-((pent-4-en-1-yloxy)carbonyl)pyrrolidine-3-ca rboxylic acid, useful for stapling/stapled with another amino acid residue comprising an olefin group to form a staple through the olefin group
  SITE 13: note = (S)-2-amino-3-(3,4-dichlorophenyl)propanoic acid
  SITE 14: note = L-glutamic acid, useful for stapling/stapled with another amino acid residue comprising a side chain amino group to form a staple through the 4-carboxyl group
  SITE 14: note = C-term amino
XDIXDXXAFVXFXE

SEQ ID NO: 1372 - protein, 14 aa, synthetic construct
  SITE 1: note = N-term Acetic Acid
  SITE 1: note = (R)-2-allylpyrrolidine-2-carboxylic acid, useful for stapling/stapled with another amino acid residue comprising an olefin group to form a staple through the olefin group
  VARIANT 4: note = 2-amino-2-(pent-4-en-1-yl)hept-6-enoic acid, useful for stapling/stapled with another amino acid residue comprising an olefin group to form a staple through one of the two olefin groups and/or with another amino acid residue comprising an olefin group to form a staple through the other of the two olefin groups
  SITE 6: note = (S)-3-(2-amino-2-carboxyethyl)benzoic acid
  SITE 7: note = N5-(4-aminobutyl)-L-glutamine, useful for stapling/stapled with another amino acid residue comprising a side chain acid group to form a staple through the amino group in the side chain
  SITE 11: note (S)-3-amino-1-((pent-4-en-1-yloxy)carbonyl)pyrrolidine-3-ca rboxylic acid, useful for stapling/stapled with another amino acid residue comprising an olefin group to form a staple through the olefin group
  SITE 13: note = (S)-2-amino-3-(3,4-dichlorophenyl)propanoic acid
  SITE 14: note = L-glutamic acid, useful for stapling/stapled with another amino acid residue comprising a side chain amino group to form a staple through the 4-carboxyl group
  SITE 14: note = C-term amino
XDIXDXXAFLXFXE

SEQ ID NO: 1373 - protein, 14 aa, synthetic construct
  SITE 1: note = N-term Acetic Acid
  SITE 1: note = (R)-2-allylpyrrolidine-2-carboxylic acid, useful for stapling/stapled with another amino acid residue comprising an olefin group to form a staple through the olefin group
  VARIANT 4: note = 2-amino-2-(pent-4-en-1-yl)hept-6-enoic acid, useful for stapling/stapled with another amino acid residue comprising an olefin group to form a staple through one of the two olefin groups and/or with another amino acid residue comprising an olefin group to form a staple through the other of the two olefin groups
  SITE 6: note = (S)-3-(2-amino-2-carboxyethyl)benzoic acid
  SITE 7: note = N5-(4-aminobutyl)-L-glutamine, useful for stapling/stapled with another amino acid residue comprising a side chain acid group to form a staple through the amino group in the side chain
  SITE 11: note (S)-3-amino-1-((pent-4-en-1-yloxy)carbonyl)pyrrolidine-3-ca rboxylic acid, useful for stapling/stapled with another amino acid residue comprising an olefin group to form a staple through the olefin group
  SITE 13: note = (S)-2-amino-3-(3,4-dichlorophenyl)propanoic acid
  SITE 14: note = L-glutamic acid, useful for stapling/stapled with another amino acid residue comprising a side chain amino group to form a staple through the 4-carboxyl group
  SITE 14: note = C-term amino
XDIXDXXAFAXFXE

SEQ ID NO: 1374 - protein, 14 aa, synthetic construct
  SITE 1: note = N-term Acetic Acid
  SITE 1: note = (R)-2-allylpyrrolidine-2-carboxylic acid, useful for stapling/stapled with another amino acid residue comprising an olefin group to form a staple through the olefin group
  VARIANT 4: note = 2-amino-2-(pent-4-en-1-yl)hept-6-enoic acid, useful for stapling/stapled with another amino acid residue comprising an olefin group to form a staple through one of the two olefin groups and/or with another amino acid residue comprising an olefin group to form a staple through the other of the two olefin groups
  SITE 6: note = (S)-3-(2-amino-2-carboxyethyl)benzoic acid
  SITE 7: note = N5-(4-aminobutyl)-L-glutamine, useful for stapling/stapled with another amino acid residue comprising a side chain acid group to form a staple through the amino group in the side chain
  SITE 11: note (S)-3-amino-1-((pent-4-en-1-yloxy)carbonyl)pyrrolidine-3-ca rboxylic acid, useful for stapling/stapled with another amino acid residue comprising an olefin group to form a staple through the olefin group
  SITE 13: note = (S)-2-amino-3-(3,4-dichlorophenyl)propanoic acid
  SITE 14: note = L-glutamic acid, useful for stapling/stapled with another amino acid residue comprising a side chain amino group to form a staple through the 4-carboxyl group
  SITE 14: note = C-term amino
XDIXDXXAFVXFXE

SEQ ID NO: 1375 - protein, 14 aa, synthetic construct
  SITE 1: note = N-term Acetic Acid
  SITE 1: note = (R)-2-allylpyrrolidine-2-carboxylic acid, useful for stapling/stapled with another amino acid residue comprising an olefin group to form a staple through the olefin group
  VARIANT 4: note = 2-amino-2-(pent-4-en-1-yl)hept-6-enoic acid, useful for stapling/stapled with another amino acid residue comprising an olefin group to form a staple through one of the two olefin groups and/or with another amino acid residue comprising an olefin group to form a staple through the other of the two olefin groups
  SITE 6: note = (S)-3-(2-amino-2-carboxyethyl)benzoic acid
  SITE 7: note = N5-(3-(methylamino)propyl)-L-glutamine, useful for stapling/stapled with another amino acid residue comprising a side chain acid group to form a staple through the amino group in the side chain
  SITE 11: note (S)-3-amino-1-((pent-4-en-1-yloxy)carbonyl)pyrrolidine-3-ca rboxylic acid, useful for stapling/stapled with another amino acid residue comprising an olefin group to form a staple through the olefin group
  SITE 13: note = (S)-2-amino-3-(3,4-dichlorophenyl)propanoic acid
  SITE 14: note = L-glutamic acid, useful for stapling/stapled with another amino acid residue comprising a side chain amino group to form a staple through the 4-carboxyl group
  SITE 14: note = C-term amino
XDIXDXXAFLXFXE

SEQ ID NO: 1376 - protein, 14 aa, synthetic construct
  SITE 1: note = N-term Acetic Acid
  SITE 1: note = (R)-2-allylpyrrolidine-2-carboxylic acid, useful for stapling/stapled with another amino acid residue comprising an olefin group to form a staple through the olefin group
  VARIANT 4: note = 2-amino-2-(pent-4-en-1-yl)hept-6-enoic acid, useful for stapling/stapled with another amino acid residue comprising an olefin group to form a staple through one of the two olefin groups and/or with another amino acid residue comprising an olefin group to form a staple through the other of the two olefin groups
  SITE 6: note = (S)-3-(2-amino-2-carboxyethyl)benzoic acid
  SITE 7: note = N5-(3-(methylamino)propyl)-L-glutamine, useful for stapling/stapled with another amino acid residue comprising a side chain acid group to form a staple through the amino group in the side chain
  SITE 11: note (S)-3-amino-1-((pent-4-en-1-yloxy)carbonyl)pyrrolidine-3-ca rboxylic acid, useful for stapling/stapled with another amino acid residue comprising an olefin group to form a staple through the olefin group
  SITE 13: note = (S)-2-amino-3-(3,4-dichlorophenyl)propanoic acid
  SITE 14: note = L-glutamic acid, useful for stapling/stapled with another amino acid residue comprising a side chain amino group to form a staple through the 4-carboxyl group
  SITE 14: note = C-term amino
XDIXDXXAFAXFXE

SEQ ID NO: 1377 - protein, 14 aa, synthetic construct
  SITE 1: note = N-term Acetic Acid
  SITE 1: note = (R)-2-allylpyrrolidine-2-carboxylic acid, useful for stapling/stapled with another amino acid residue comprising an olefin group to form a staple through the olefin group
  VARIANT 4: note = 2-amino-2-(pent-4-en-1-yl)hept-6-enoic acid, useful for stapling/stapled with another amino acid residue comprising an olefin group to form a staple through one of the two olefin groups and/or with another amino acid residue comprising an olefin group to form a staple through the other of the two olefin groups
  SITE 6: note = (S)-3-(2-amino-2-carboxyethyl)benzoic acid
  SITE 7: note = N5-(3-(methylamino)propyl)-L-glutamine, useful for stapling/stapled with another amino acid residue comprising a side chain acid group to form a staple through the amino group in the side chain
  SITE 11: note (S)-3-amino-1-((pent-4-en-1-yloxy)carbonyl)pyrrolidine-3-ca rboxylic acid, useful for stapling/stapled with another amino acid residue comprising an olefin group to form a staple through the olefin group
  SITE 13: note = (S)-2-amino-3-(3,4-dichlorophenyl)propanoic acid
  SITE 14: note = L-glutamic acid, useful for stapling/stapled with another amino acid residue comprising a side chain amino group to form a staple through the 4-carboxyl group
  SITE 14: note = C-term amino
XDIXDXXAFVXFXE

SEQ ID NO: 1378 - protein, 14 aa, synthetic construct
  SITE 1: note = N-term Acetic Acid
  SITE 1: note = (R)-2-allylpyrrolidine-2-carboxylic acid, useful for stapling/stapled with another amino acid residue comprising an olefin group to form a staple through the olefin group
  VARIANT 4: note = 2-amino-2-(pent-4-en-1-yl)hept-6-enoic acid, useful for stapling/stapled with another amino acid residue comprising an olefin group to form a staple through one of the two olefin groups and/or with another amino acid residue comprising an olefin group to form a staple through the other of the two olefin groups
  SITE 6: note = (S)-3-(2-amino-2-carboxyethyl)benzoic acid
  SITE 7: note = L-glutamic acid, useful for stapling/stapled with another amino acid residue comprising a side chain amino group to form a staple through the 4-carboxyl group
  SITE 11: note (S)-3-amino-1-((pent-4-en-1-yloxy)carbonyl)pyrrolidine-3-ca rboxylic acid, useful for stapling/stapled with another amino acid residue comprising an olefin group to form a staple through the olefin group
  SITE 13: note = (S)-2-amino-3-(3,4-dichlorophenyl)propanoic acid
  SITE 14: note = N5-(3-(methylamino)propyl)-L-glutamine, useful for stapling/stapled with another amino acid residue comprising a side chain acid group to form a staple through the amino group in the side chain
  SITE 14: note = C-term amino
XDIXDXEAFLXFXX

SEQ ID NO: 1379 - protein, 14 aa, synthetic construct
  SITE 1: note = N-term Acetic Acid
  SITE 1: note = (R)-2-allylpyrrolidine-2-carboxylic acid, useful for stapling/stapled with another amino acid residue comprising an olefin group to form a staple through the olefin group
  VARIANT 4: note = 2-amino-2-(pent-4-en-1-yl)hept-6-enoic acid, useful for stapling/stapled with another amino acid residue comprising an olefin group to form a staple through one of the two olefin groups and/or with another amino acid residue comprising an olefin group to form a staple through the other of the two olefin groups
  SITE 6: note = (S)-3-(2-amino-2-carboxyethyl)benzoic acid
  SITE 7: note = L-glutamic acid, useful for stapling/stapled with another amino acid residue comprising a side chain amino group to form a staple through the 4-carboxyl group
  SITE 11: note (S)-3-amino-1-((pent-4-en-1-yloxy)carbonyl)pyrrolidine-3-ca rboxylic acid, useful for stapling/stapled with another amino acid residue comprising an olefin group to form a staple through the olefin group
  SITE 13: note = (S)-2-amino-3-(3,4-dichlorophenyl)propanoic acid
  SITE 14: note = N5-(3-(methylamino)propyl)-L-glutamine, useful for stapling/stapled with another amino acid residue comprising a side chain acid group to form a staple through the amino group in the side chain
  SITE 14: note = C-term amino
XDIXDXEAFAXFXX

SEQ ID NO: 1380 - protein, 14 aa, synthetic construct
  SITE 1: note = N-term Acetic Acid
  SITE 1: note = (R)-2-allylpyrrolidine-2-carboxylic acid, useful for stapling/stapled with another amino acid residue comprising an olefin group to form a staple through the olefin group
  VARIANT 4: note = 2-amino-2-(pent-4-en-1-yl)hept-6-enoic acid, useful for stapling/stapled with another amino acid residue comprising an olefin group to form a staple through one of the two olefin groups and/or with another amino acid residue comprising an olefin group to form a staple through the other of the two olefin groups
  SITE 6: note = (S)-3-(2-amino-2-carboxyethyl)benzoic acid
  SITE 7: note = L-glutamic acid, useful for stapling/stapled with another amino acid residue comprising a side chain amino group to form a staple through the 4-carboxyl group
  SITE 11: note (S)-3-amino-1-((pent-4-en-1-yloxy)carbonyl)pyrrolidine-3-ca rboxylic acid, useful for stapling/stapled with another amino acid residue comprising an olefin group to form a staple through the olefin group
  SITE 13: note = (S)-2-amino-3-(3,4-dichlorophenyl)propanoic acid
  SITE 14: note = N5-(3-(methylamino)propyl)-L-glutamine, useful for stapling/stapled with another amino acid residue comprising a side chain acid group to form a staple through the amino group in the side chain
  SITE 14: note = C-term amino
XDIXDXEAFVXFXX

SEQ ID NO: 1381 - protein, 15 aa, synthetic construct
  SITE 1: note = N-term Acetic Acid
  SITE 1: note = (S)-2-amino-2-methylhept-6-enoic acid, useful for stapling/stapled with another amino acid residue comprising an olefin group to form a staple through the olefin group
  SITE 2: note (S)-2-amino-3-((carboxymethyl)(2,2,2-trifluoroethyl)amino) propanoic acid
  SITE 4: note = (S)-2-amino-3,3-diphenylpropanoic acid
  VARIANT 5: note = 2-amino-2-(pent-4-en-1-yl)hept-6-enoic acid, useful for stapling/stapled with another amino acid residue comprising an olefin group to form a staple through one of the two olefin groups and/or with another amino acid residue comprising an olefin group to form a staple through the other of the two olefin groups
  SITE 7: note = (S)-3-(2-amino-2-carboxyethyl)benzoic acid
  SITE 8: note = 2-amino-2-methylpropanoic acid
  SITE 11: note = L-lysine, useful for stapling/stapled with another amino acid residue comprising a side chain acid group to form a staple through the 6-amino group
  SITE 12: note (S)-3-amino-1-((but-3-en-1-yloxy)carbonyl)pyrrolidine-3-car boxylic acid, useful for stapling/stapled with another amino acid residue comprising an olefin group to form a staple through the olefin group
  SITE 14: note = (S)-2-amino-3-(3,4-dichlorophenyl)propanoic acid
  SITE 15: note = L-glutamic acid, useful for stapling/stapled with another amino acid residue comprising a side chain amino group to form a staple through the 4-carboxyl group
  SITE 15: note = C-term amino
XXDXXDXXAFKXFXE

SEQ ID NO: 1382 - protein, 15 aa, synthetic construct
  SITE 1: note = N-term Acetic Acid
  SITE 1: note = (S)-2-amino-2-methylhept-6-enoic acid, useful for stapling/stapled with another amino acid residue comprising an olefin group to form a staple through the olefin group
  SITE 2: note = (S)-3-(2-amino-2-carboxyethyl)benzoic acid
  SITE 4: note = (S)-2-amino-3,3-diphenylpropanoic acid
  VARIANT 5: note = 2-amino-2-(pent-4-en-1-yl)hept-6-enoic acid, useful for stapling/stapled with another amino acid residue comprising an olefin group to form a staple through one of the two olefin groups and/or with another amino acid residue comprising an olefin group to form a staple through the other of the two olefin groups
  SITE 7: note = (S)-3-(2-amino-2-carboxyethyl)benzoic acid
  SITE 8: note = 2-amino-2-methylpropanoic acid
  SITE 11: note = L-lysine, useful for stapling/stapled with another amino acid residue comprising a side chain acid group to form a staple through the 6-amino group
  SITE 12: note (S)-3-amino-1-((but-3-en-1-yloxy)carbonyl)pyrrolidine-3-car boxylic acid, useful for stapling/stapled with another amino acid residue comprising an olefin group to form a staple through the olefin group
  SITE 14: note = (S)-2-amino-3-(3,4-dichlorophenyl)propanoic acid
  SITE 15: note = L-glutamic acid, useful for stapling/stapled with another amino acid residue comprising a side chain amino group to form a staple through the 4-carboxyl group
  SITE 15: note = C-term amino
XXDXXDXXAFKXFXE

SEQ ID NO: 1383 - protein, 15 aa, synthetic construct
  SITE 1: note = N-term Acetic Acid
  SITE 1: note = (S)-2-amino-2-methylhept-6-enoic acid, useful for stapling/stapled with another amino acid residue comprising an olefin group to form a staple through the olefin group
  SITE 4: note = (S)-2-amino-3,3-diphenylpropanoic acid
  VARIANT 5: note = 2-amino-2-(pent-4-en-1-yl)hept-6-enoic acid, useful for stapling/stapled with another amino acid residue comprising an olefin group to form a staple through one of the two olefin groups and/or with another amino acid residue comprising an olefin group to form a staple through the other of the two olefin groups
  SITE 7: note = (S)-3-(2-amino-2-carboxyethyl)benzoic acid
  SITE 8: note = 2-amino-2-methylpropanoic acid
  SITE 11: note = L-lysine, useful for stapling/stapled with another amino acid residue comprising a side chain acid group to form a staple through the 6-amino group
  SITE 12: note (S)-3-amino-1-((but-3-en-1-yloxy)carbonyl)pyrrolidine-3-car boxylic acid, useful for stapling/stapled with another amino acid residue comprising an olefin group to form a staple through the olefin group
  SITE 14: note = (S)-2-amino-3-(3,4-dichlorophenyl)propanoic acid
  SITE 15: note = L-glutamic acid, useful for stapling/stapled with another amino acid residue comprising a side chain amino group to form a staple through the 4-carboxyl group
  SITE 15: note = C-term amino
XTDXXDXXAFKXFXE

SEQ ID NO: 1384 - protein, 15 aa, synthetic construct
  SITE 1: note = N-term Acetic Acid
  SITE 1: note = (S)-2-amino-2-methylhept-6-enoic acid, useful for stapling/stapled with another amino acid residue comprising an olefin group to form a staple through the olefin group
  SITE 4: note = (S)-2-amino-3,3-diphenylpropanoic acid
  VARIANT 5: note = 2-amino-2-(pent-4-en-1-yl)hept-6-enoic acid, useful for stapling/stapled with another amino acid residue comprising an olefin group to form a staple through one of the two olefin groups and/or with another amino acid residue comprising an olefin group to form a staple through the other of the two olefin groups
  SITE 7: note = (S)-3-(2-amino-2-carboxyethyl)benzoic acid
  SITE 8: note = 2-amino-2-methylpropanoic acid
  SITE 11: note = L-lysine, useful for stapling/stapled with another amino acid residue comprising a side chain acid group to form a staple through the 6-amino group
  SITE 12: note (S)-3-amino-1-((but-3-en-1-yloxy)carbonyl)pyrrolidine-3-car boxylic acid, useful for stapling/stapled with another amino acid residue comprising an olefin group to form a staple through the olefin group
  SITE 14: note = (S)-2-amino-3-(3,4-dichlorophenyl)propanoic acid
  SITE 15: note = L-glutamic acid, useful for stapling/stapled with another amino acid residue comprising a side chain amino group to form a staple through the 4-carboxyl group
  SITE 15: note = C-term amino
XFDXXDXXAFKXFXE

SEQ ID NO: 1385 - protein, 15 aa, synthetic construct
  SITE 1: note = N-term Acetic Acid
  SITE 1: note = (R)-2-allylpyrrolidine-2-carboxylic acid, useful for stapling/stapled with another amino acid residue comprising an olefin group to form a staple through the olefin group
  SITE 3: note = (S)-2-amino-4,4-dimethylpentanoic acid
  VARIANT 4: note = 2-amino-2-(pent-4-en-1-yl)hept-6-enoic acid, useful for stapling/stapled with another amino acid residue comprising an olefin group to form a staple through one of the two olefin groups and/or with another amino acid residue comprising an olefin group to form a staple through the other of the two olefin groups
  SITE 6: note = (S)-3-(2-amino-2-carboxyethyl)benzoic acid
  SITE 7: note = 2-amino-2-methylpropanoic acid
  SITE 10: note = (S)-2-amino-6-(1H-1,2,3-triazol-1-yl)hexanoic acid, useful for stapling/stapled with another amino acid residue to form a staple through the 4-position of the triazolyl group
  SITE 11: note (S)-3-amino-1-((S)-3-methylhept-6-enoyl)pyrrolidine-3-carbo xylic acid, useful for stapling/stapled with another amino acid residue comprising an olefin group to form a staple through the olefin group
  SITE 12: note = (S)-2-amino-3-(thiophen-3-yl)propanoic acid
  SITE 13: note = (S)-2-amino-3-(benzo[b]thiophen-3-yl)propanoic acid
  SITE 14: note = L-alanine, useful for stapling/stapled with another amino acid residue comprising a triazolyl group to form a staple through the terminal methyl group
  SITE 15: note = C-term amino
XDXXDXXAFXXXXAA

SEQ ID NO: 1386 - protein, 15 aa, synthetic construct
  SITE 1: note = N-term Acetic Acid
  SITE 1: note = (R)-2-allylpyrrolidine-2-carboxylic acid, useful for stapling/stapled with another amino acid residue comprising an olefin group to form a staple through the olefin group
  SITE 3: note = (S)-2-amino-4,4-dimethylpentanoic acid
  VARIANT 4: note = 2-amino-2-(pent-4-en-1-yl)hept-6-enoic acid, useful for stapling/stapled with another amino acid residue comprising an olefin group to form a staple through one of the two olefin groups and/or with another amino acid residue comprising an olefin group to form a staple through the other of the two olefin groups
  SITE 6: note = (S)-3-(2-amino-2-carboxyethyl)benzoic acid
  SITE 7: note = 2-amino-2-methylpropanoic acid
  SITE 10: note = (S)-2-amino-6-(1H-1,2,3-triazol-1-yl)hexanoic acid, useful for stapling/stapled with another amino acid residue to form a staple through the 4-position of the triazolyl group
  SITE 11: note (S)-3-amino-1-((R)-3-methylhept-6-enoyl)pyrrolidine-3-carbo xylic acid, useful for stapling/stapled with another amino acid residue comprising an olefin group to form a staple through the olefin group
  SITE 12: note = (S)-2-amino-3-(thiophen-3-yl)propanoic acid
  SITE 13: note = (S)-2-amino-3-(benzo[b]thiophen-3-yl)propanoic acid
  SITE 14: note = L-alanine, useful for stapling/stapled with another amino acid residue comprising a triazolyl group to form a staple through the terminal methyl group
  SITE 15: note = C-term amino
XDXXDXXAFXXXXAA

SEQ ID NO: 1387 - protein, 14 aa, synthetic construct
  SITE 1: note = N-term Acetic Acid
  SITE 1: note = (R)-2-allylpyrrolidine-2-carboxylic acid, useful for stapling/stapled with another amino acid residue comprising an olefin group to form a staple through the olefin group
  VARIANT 4: note = 2-amino-2-(pent-4-en-1-yl)hept-6-enoic acid, useful for stapling/stapled with another amino acid residue comprising an olefin group to form a staple through one of the two olefin groups and/or with another amino acid residue comprising an olefin group to form a staple through the other of the two olefin groups
  SITE 6: note = (S)-3-(2-amino-2-carboxyethyl)benzoic acid
  SITE 7: note = L-glutamic acid, useful for stapling/stapled with another amino acid residue comprising a side chain amino group to form a staple through the 4-carboxyl group
  SITE 11: note (S)-3-amino-1-((pent-4-en-1-yloxy)carbonyl)pyrrolidine-3-ca rboxylic acid, useful for stapling/stapled with another amino acid residue comprising an olefin group to form a staple through the olefin group
  SITE 13: note = (S)-2-amino-3-(3,4-dichlorophenyl)propanoic acid
  SITE 14: note = N5-((1r,4S)-4-(aminomethyl)cyclohexyl)-L-glutamine, useful for stapling/stapled with another amino acid residue comprising a side chain acid group to form a staple through the amino group in the side chain
  SITE 14: note = C-term amino
XDIXDXEAFAXFXX

SEQ ID NO: 1388 - protein, 15 aa, synthetic construct
  SITE 1: note = N-term Acetic Acid
  SITE 1: note = (R)-2-allylpyrrolidine-2-carboxylic acid, useful for stapling/stapled with another amino acid residue comprising an olefin group to form a staple through the olefin group
  SITE 3: note = (S)-2-amino-4,4-dimethylpentanoic acid
  VARIANT 4: note = 2-amino-2-(pent-4-en-1-yl)hept-6-enoic acid, useful for stapling/stapled with another amino acid residue comprising an olefin group to form a staple through one of the two olefin groups and/or with another amino acid residue comprising an olefin group to form a staple through the other of the two olefin groups
  SITE 6: note = (S)-3-(2-amino-2-carboxyethyl)benzoic acid
  SITE 7: note = 2-amino-2-methylpropanoic acid
  SITE 10: note = (S)-2-amino-6-(1H-1,2,3-triazol-1-yl)hexanoic acid, useful for stapling/stapled with another amino acid residue to form a staple through the 4-position of the triazolyl group
  SITE 11: note (S)-3-amino-1-((S)-3-isopropylhept-6-enoyl)pyrrolidine-3-ca rboxylic acid, useful for stapling/stapled with another amino acid residue comprising an olefin group to form a staple through the olefin group
  SITE 12: note = (S)-2-amino-3-(thiophen-3-yl)propanoic acid
  SITE 13: note = (S)-2-amino-3-(benzo[b]thiophen-3-yl)propanoic acid
  SITE 14: note = L-alanine, useful for stapling/stapled with another amino acid residue comprising a triazolyl group to form a staple through the terminal methyl group
  SITE 15: note = C-term amino
XDXXDXXAFXXXXAA

SEQ ID NO: 1389 - protein, 15 aa, synthetic construct
  SITE 1: note = N-term Acetic Acid
  SITE 1: note = (R)-2-allylpyrrolidine-2-carboxylic acid, useful for stapling/stapled with another amino acid residue comprising an olefin group to form a staple through the olefin group
  SITE 3: note = (S)-2-amino-4,4-dimethylpentanoic acid
  VARIANT 4: note = 2-amino-2-(pent-4-en-1-yl)hept-6-enoic acid, useful for stapling/stapled with another amino acid residue comprising an olefin group to form a staple through one of the two olefin groups and/or with another amino acid residue comprising an olefin group to form a staple through the other of the two olefin groups
  SITE 6: note = (S)-3-(2-amino-2-carboxyethyl)benzoic acid
  SITE 7: note = 2-amino-2-methylpropanoic acid
  SITE 10: note = (S)-2-amino-6-(1H-1,2,3-triazol-1-yl)hexanoic acid, useful for stapling/stapled with another amino acid residue to form a staple through the 4-position of the triazolyl group
  SITE 11: note (S)-3-amino-1-((S)-3-isopropylhept-6-enoyl)pyrrolidine-3-ca rboxylic acid, useful for stapling/stapled with another amino acid residue comprising an olefin group to form a staple through the olefin group
  SITE 12: note = (S)-2-amino-3-(thiophen-3-yl)propanoic acid
  SITE 13: note = (S)-2-amino-3-(benzo[b]thiophen-3-yl)propanoic acid
  SITE 14: note = L-alanine, useful for stapling/stapled with another amino acid residue comprising a triazolyl group to form a staple through the terminal methyl group
  SITE 15: note = C-term amino
XDXXDXXAFXXXXAA

SEQ ID NO: 1390 - protein, 17 aa, synthetic construct
  SITE 1: note = N-term Acetic Acid
  SITE 1: note = (R)-2-allylpyrrolidine-2-carboxylic acid, useful for stapling/stapled with another amino acid residue comprising an olefin group to form a staple through the olefin group
  SITE 3: note = (S)-2-amino-4,4-dimethylpentanoic acid
  VARIANT 4: note = 2-amino-2-(pent-4-en-1-yl)hept-6-enoic acid, useful for stapling/stapled with another amino acid residue comprising an olefin group to form a staple through one of the two olefin groups and/or with another amino acid residue comprising an olefin group to form a staple through the other of the two olefin groups
  SITE 6: note = (S)-3-(2-amino-2-carboxyethyl)benzoic acid
  SITE 7: note = 2-amino-2-methylpropanoic acid
  SITE 10: note = L-lysine, useful for stapling/stapled with another amino acid residue comprising a side chain acid group to form a staple through the 6-amino group
  SITE 11: note (S)-3-amino-1-((pent-4-en-1-yloxy)carbonyl)pyrrolidine-3-ca rboxylic acid, useful for stapling/stapled with another amino acid residue comprising an olefin group to form a staple through the olefin group
  SITE 12: note = (S)-2-amino-3-(thiophen-3-yl)propanoic acid
  SITE 13: note = (S)-2-amino-3-(benzo[b]thiophen-3-yl)propanoic acid
  SITE 14: note = L-glutamic acid, useful for stapling/stapled with another amino acid residue comprising a side chain amino group to form a staple through the 4-carboxyl group
  SITE 17: note = (S)-32-amino-26-oxo-2,5,8,11,14,17,20,23-octaoxa-27- azatritriacontan-33-oic acid
  SITE 17: note = C-term amino
XDXXDXXAFKXXXETAX

SEQ ID NO: 1391 - protein, 17 aa, synthetic construct
  SITE 1: note = N-term Acetic Acid
  SITE 1: note = (R)-2-allylpyrrolidine-2-carboxylic acid, useful for stapling/stapled with another amino acid residue comprising an olefin group to form a staple through the olefin group
  SITE 3: note = (S)-2-amino-4,4-dimethylpentanoic acid
  VARIANT 4: note = 2-amino-2-(pent-4-en-1-yl)hept-6-enoic acid, useful for stapling/stapled with another amino acid residue comprising an olefin group to form a staple through one of the two olefin groups and/or with another amino acid residue comprising an olefin group to form a staple through the other of the two olefin groups
  SITE 6: note = (S)-3-(2-amino-2-carboxyethyl)benzoic acid
  SITE 7: note = 2-amino-2-methylpropanoic acid
  SITE 10: note = L-lysine, useful for stapling/stapled with another amino acid residue comprising a side chain acid group to form a staple through the 6-amino group
  SITE 11: note (S)-3-amino-1-((pent-4-en-1-yloxy)carbonyl)pyrrolidine-3-ca rboxylic acid, useful for stapling/stapled with another amino acid residue comprising an olefin group to form a staple through the olefin group
  SITE 12: note = (S)-2-amino-3-(thiophen-3-yl)propanoic acid
  SITE 13: note = (S)-2-amino-3-(benzo[b]thiophen-3-yl)propanoic acid
  SITE 14: note = L-glutamic acid, useful for stapling/stapled with another amino acid residue comprising a side chain amino group to form a staple through the 4-carboxyl group
  SITE 17: note = (S)-32-amino-26-oxo-2,5,8,11,14,17,20,23-octaoxa-27- azatritriacontan-33-oic acid
  SITE 17: note = C-term amino
XDXXDXXAFKXXXEVEX

SEQ ID NO: 1392 - protein, 17 aa, synthetic construct
  SITE 1: note = N-term Acetic Acid
  SITE 1: note = (R)-2-allylpyrrolidine-2-carboxylic acid, useful for stapling/stapled with another amino acid residue comprising an olefin group to form a staple through the olefin group
  SITE 3: note = (S)-2-amino-4,4-dimethylpentanoic acid
  VARIANT 4: note = 2-amino-2-(pent-4-en-1-yl)hept-6-enoic acid, useful for stapling/stapled with another amino acid residue comprising an olefin group to form a staple through one of the two olefin groups and/or with another amino acid residue comprising an olefin group to form a staple through the other of the two olefin groups
  SITE 6: note = (S)-3-(2-amino-2-carboxyethyl)benzoic acid
  SITE 7: note = 2-amino-2-methylpropanoic acid
  SITE 10: note = L-lysine, useful for stapling/stapled with another amino acid residue comprising a side chain acid group to form a staple through the 6-amino group
  SITE 11: note (S)-3-amino-1-((pent-4-en-1-yloxy)carbonyl)pyrrolidine-3-ca rboxylic acid, useful for stapling/stapled with another amino acid residue comprising an olefin group to form a staple through the olefin group
  SITE 12: note = (S)-2-amino-3-(thiophen-3-yl)propanoic acid
  SITE 13: note = (S)-2-amino-3-(benzo[b]thiophen-3-yl)propanoic acid
  SITE 14: note = L-glutamic acid, useful for stapling/stapled with another amino acid residue comprising a side chain amino group to form a staple through the 4-carboxyl group
  SITE 17: note = (S)-32-amino-26-oxo-2,5,8,11,14,17,20,23-octaoxa-27- azatritriacontan-33-oic acid
  SITE 17: note = C-term amino
XDXXDXXAFKXXXEVTX

SEQ ID NO: 1393 - protein, 17 aa, synthetic construct
  SITE 1: note = N-term Acetic Acid
  SITE 1: note = (R)-2-allylpyrrolidine-2-carboxylic acid, useful for stapling/stapled with another amino acid residue comprising an olefin group to form a staple through the olefin group
  SITE 3: note = (S)-2-amino-4,4-dimethylpentanoic acid
  VARIANT 4: note = 2-amino-2-(pent-4-en-1-yl)hept-6-enoic acid, useful for stapling/stapled with another amino acid residue comprising an olefin group to form a staple through one of the two olefin groups and/or with another amino acid residue comprising an olefin group to form a staple through the other of the two olefin groups
  SITE 6: note = (S)-3-(2-amino-2-carboxyethyl)benzoic acid
  SITE 7: note = 2-amino-2-methylpropanoic acid
  SITE 10: note = L-lysine, useful for stapling/stapled with another amino acid residue comprising a side chain acid group to form a staple through the 6-amino group
  SITE 11: note (S)-3-amino-1-((pent-4-en-1-yloxy)carbonyl)pyrrolidine-3-ca rboxylic acid, useful for stapling/stapled with another amino acid residue comprising an olefin group to form a staple through the olefin group
  SITE 12: note = (S)-2-amino-3-(thiophen-3-yl)propanoic acid
  SITE 13: note = (S)-2-amino-3-(benzo[b]thiophen-3-yl)propanoic acid
  SITE 14: note = L-glutamic acid, useful for stapling/stapled with another amino acid residue comprising a side chain amino group to form a staple through the 4-carboxyl group
  SITE 17: note = (S)-32-amino-26-oxo-2,5,8,11,14,17,20,23-octaoxa-27- azatritriacontan-33-oic acid
  SITE 17: note = C-term amino
XDXXDXXAFKXXXELSX

SEQ ID NO: 1394 - protein, 17 aa, synthetic construct
  SITE 1: note = N-term Acetic Acid
  SITE 1: note = (R)-2-allylpyrrolidine-2-carboxylic acid, useful for stapling/stapled with another amino acid residue comprising an olefin group to form a staple through the olefin group
  SITE 3: note = (S)-2-amino-4,4-dimethylpentanoic acid
  VARIANT 4: note = 2-amino-2-(pent-4-en-1-yl)hept-6-enoic acid, useful for stapling/stapled with another amino acid residue comprising an olefin group to form a staple through one of the two olefin groups and/or with another amino acid residue comprising an olefin group to form a staple through the other of the two olefin groups
  SITE 6: note = (S)-3-(2-amino-2-carboxyethyl)benzoic acid
  SITE 7: note = 2-amino-2-methylpropanoic acid
  SITE 10: note = L-lysine, useful for stapling/stapled with another amino acid residue comprising a side chain acid group to form a staple through the 6-amino group
  SITE 11: note (S)-3-amino-1-((pent-4-en-1-yloxy)carbonyl)pyrrolidine-3-ca rboxylic acid, useful for stapling/stapled with another amino acid residue comprising an olefin group to form a staple through the olefin group
  SITE 12: note = (S)-2-amino-3-(thiophen-3-yl)propanoic acid
  SITE 13: note = (S)-2-amino-3-(benzo[b]thiophen-3-yl)propanoic acid
  SITE 14: note = L-glutamic acid, useful for stapling/stapled with another amino acid residue comprising a side chain amino group to form a staple through the 4-carboxyl group
  SITE 15: note = 2-amino-2-methylpropanoic acid
  SITE 17: note = (S)-32-amino-26-oxo-2,5,8,11,14,17,20,23-octaoxa-27- azatritriacontan-33-oic acid
  SITE 17: note = C-term amino
XDXXDXXAFKXXXEXSX

SEQ ID NO: 1395 - protein, 14 aa, synthetic construct
  SITE 1: note = N-term Acetic Acid
  SITE 1: note = (R)-2-allylpyrrolidine-2-carboxylic acid, useful for stapling/stapled with another amino acid residue comprising an olefin group to form a staple through the olefin group
  VARIANT 4: note = 2-amino-2-(pent-4-en-1-yl)hept-6-enoic acid, useful for stapling/stapled with another amino acid residue comprising an olefin group to form a staple through one of the two olefin groups and/or with another amino acid residue comprising an olefin group to form a staple through the other of the two olefin groups
  SITE 6: note = (S)-3-(2-amino-2-carboxyethyl)benzoic acid
  SITE 7: note = N5-(4-(methylamino)butyl)-L-glutamine, useful for stapling/stapled with another amino acid residue comprising a side chain acid group to form a staple through the amino group in the side chain
  SITE 11: note (S)-3-amino-1-((pent-4-en-1-yloxy)carbonyl)pyrrolidine-3-ca rboxylic acid, useful for stapling/stapled with another amino acid residue comprising an olefin group to form a staple through the olefin group
  SITE 13: note = (S)-2-amino-3-(3,4-dichlorophenyl)propanoic acid
  SITE 14: note = L-glutamic acid, useful for stapling/stapled with another amino acid residue comprising a side chain amino group to form a staple through the 4-carboxyl group
  SITE 14: note = C-term amino
XDLXDXXAFLXFXE

SEQ ID NO: 1396 - protein, 14 aa, synthetic construct
  SITE 1: note = N-term Acetic Acid
  SITE 1: note = (R)-2-allylpyrrolidine-2-carboxylic acid, useful for stapling/stapled with another amino acid residue comprising an olefin group to form a staple through the olefin group
  VARIANT 4: note = 2-amino-2-(pent-4-en-1-yl)hept-6-enoic acid, useful for stapling/stapled with another amino acid residue comprising an olefin group to form a staple through one of the two olefin groups and/or with another amino acid residue comprising an olefin group to form a staple through the other of the two olefin groups
  SITE 6: note = (S)-3-(2-amino-2-carboxyethyl)benzoic acid
  SITE 7: note = N5-(4-(methylamino)butyl)-L-glutamine, useful for stapling/stapled with another amino acid residue comprising a side chain acid group to form a staple through the amino group in the side chain
  SITE 11: note (S)-3-amino-1-((pent-4-en-1-yloxy)carbonyl)pyrrolidine-3-ca rboxylic acid, useful for stapling/stapled with another amino acid residue comprising an olefin group to form a staple through the olefin group
  SITE 13: note = (S)-2-amino-3-(3,4-dichlorophenyl)propanoic acid
  SITE 14: note = L-glutamic acid, useful for stapling/stapled with another amino acid residue comprising a side chain amino group to form a staple through the 4-carboxyl group
  SITE 14: note = C-term amino
XDLXDXXAFAXFXE

SEQ ID NO: 1397 - protein, 14 aa, synthetic construct
  SITE 1: note = N-term Acetic Acid
  SITE 1: note = (R)-2-allylpyrrolidine-2-carboxylic acid, useful for stapling/stapled with another amino acid residue comprising an olefin group to form a staple through the olefin group
  VARIANT 4: note = 2-amino-2-(pent-4-en-1-yl)hept-6-enoic acid, useful for stapling/stapled with another amino acid residue comprising an olefin group to form a staple through one of the two olefin groups and/or with another amino acid residue comprising an olefin group to form a staple through the other of the two olefin groups
  SITE 6: note = (S)-3-(2-amino-2-carboxyethyl)benzoic acid
  SITE 7: note = N5-(4-(methylamino)butyl)-L-glutamine, useful for stapling/stapled with another amino acid residue comprising a side chain acid group to form a staple through the amino group in the side chain
  SITE 11: note (S)-3-amino-1-((pent-4-en-1-yloxy)carbonyl)pyrrolidine-3-ca rboxylic acid, useful for stapling/stapled with another amino acid residue comprising an olefin group to form a staple through the olefin group
  SITE 13: note = (S)-2-amino-3-(3,4-dichlorophenyl)propanoic acid
  SITE 14: note = L-glutamic acid, useful for stapling/stapled with another amino acid residue comprising a side chain amino group to form a staple through the 4-carboxyl group
  SITE 14: note = C-term amino
XDLXDXXAFVXFXE

SEQ ID NO: 1398 - protein, 14 aa, synthetic construct
  SITE 1: note = N-term Acetic Acid
  SITE 1: note = (R)-2-allylpyrrolidine-2-carboxylic acid, useful for stapling/stapled with another amino acid residue comprising an olefin group to form a staple through the olefin group
  VARIANT 4: note = 2-amino-2-(pent-4-en-1-yl)hept-6-enoic acid, useful for stapling/stapled with another amino acid residue comprising an olefin group to form a staple through one of the two olefin groups and/or with another amino acid residue comprising an olefin group to form a staple through the other of the two olefin groups
  SITE 6: note = (S)-3-(2-amino-2-carboxyethyl)benzoic acid
  SITE 7: note = L-glutamic acid, useful for stapling/stapled with another amino acid residue comprising a side chain amino group to form a staple through the 4-carboxyl group
  SITE 11: note (S)-3-amino-1-((pent-4-en-1-yloxy)carbonyl)pyrrolidine-3-ca rboxylic acid, useful for stapling/stapled with another amino acid residue comprising an olefin group to form a staple through the olefin group
  SITE 13: note = (S)-2-amino-3-(3,4-dichlorophenyl)propanoic acid
  SITE 14: note = N5-(4-(methylamino)butyl)-L-glutamine, useful for stapling/stapled with another amino acid residue comprising a side chain acid group to form a staple through the amino group in the side chain
  SITE 14: note = C-term amino
XDLXDXEAFLXFXX

SEQ ID NO: 1399 - protein, 14 aa, synthetic construct
  SITE 1: note = N-term Acetic Acid
  SITE 1: note = (R)-2-allylpyrrolidine-2-carboxylic acid, useful for stapling/stapled with another amino acid residue comprising an olefin group to form a staple through the olefin group
  VARIANT 4: note = 2-amino-2-(pent-4-en-1-yl)hept-6-enoic acid, useful for stapling/stapled with another amino acid residue comprising an olefin group to form a staple through one of the two olefin groups and/or with another amino acid residue comprising an olefin group to form a staple through the other of the two olefin groups
  SITE 6: note = (S)-3-(2-amino-2-carboxyethyl)benzoic acid
  SITE 7: note = L-glutamic acid, useful for stapling/stapled with another amino acid residue comprising a side chain amino group to form a staple through the 4-carboxyl group
  SITE 11: note (S)-3-amino-1-((pent-4-en-1-yloxy)carbonyl)pyrrolidine-3-ca rboxylic acid, useful for stapling/stapled with another amino acid residue comprising an olefin group to form a staple through the olefin group
  SITE 13: note = (S)-2-amino-3-(3,4-dichlorophenyl)propanoic acid
  SITE 14: note = N5-(4-(methylamino)butyl)-L-glutamine, useful for stapling/stapled with another amino acid residue comprising a side chain acid group to form a staple through the amino group in the side chain
  SITE 14: note = C-term amino
XDLXDXEAFAXFXX

SEQ ID NO: 1400 - protein, 14 aa, synthetic construct
  SITE 1: note = N-term Acetic Acid
  SITE 1: note = (R)-2-allylpyrrolidine-2-carboxylic acid, useful for stapling/stapled with another amino acid residue comprising an olefin group to form a staple through the olefin group
  VARIANT 4: note = 2-amino-2-(pent-4-en-1-yl)hept-6-enoic acid, useful for stapling/stapled with another amino acid residue comprising an olefin group to form a staple through one of the two olefin groups and/or with another amino acid residue comprising an olefin group to form a staple through the other of the two olefin groups
  SITE 6: note = (S)-3-(2-amino-2-carboxyethyl)benzoic acid
  SITE 7: note = L-glutamic acid, useful for stapling/stapled with another amino acid residue comprising a side chain amino group to form a staple through the 4-carboxyl group
  SITE 11: note (S)-3-amino-1-((pent-4-en-1-yloxy)carbonyl)pyrrolidine-3-ca rboxylic acid, useful for stapling/stapled with another amino acid residue comprising an olefin group to form a staple through the olefin group
  SITE 13: note = (S)-2-amino-3-(3,4-dichlorophenyl)propanoic acid
  SITE 14: note = N5-(4-(methylamino)butyl)-L-glutamine, useful for stapling/stapled with another amino acid residue comprising a side chain acid group to form a staple through the amino group in the side chain
  SITE 14: note = C-term amino
XDLXDXEAFVXFXX

SEQ ID NO: 1401 - protein, 14 aa, synthetic construct
  SITE 1: note = N-term Acetic Acid
  SITE 1: note = (R)-2-allylpyrrolidine-2-carboxylic acid, useful for stapling/stapled with another amino acid residue comprising an olefin group to form a staple through the olefin group
  VARIANT 4: note = 2-amino-2-(pent-4-en-1-yl)hept-6-enoic acid, useful for stapling/stapled with another amino acid residue comprising an olefin group to form a staple through one of the two olefin groups and/or with another amino acid residue comprising an olefin group to form a staple through the other of the two olefin groups
  SITE 6: note = (S)-3-(2-amino-2-carboxyethyl)benzoic acid
  SITE 7: note = L-glutamic acid, useful for stapling/stapled with another amino acid residue comprising a side chain amino group to form a staple through the 4-carboxyl group
  SITE 11: note (S)-3-amino-1-((pent-4-en-1-yloxy)carbonyl)pyrrolidine-3-ca rboxylic acid, useful for stapling/stapled with another amino acid residue comprising an olefin group to form a staple through the olefin group
  SITE 13: note = (S)-2-amino-3-(3,4-dichlorophenyl)propanoic acid
  SITE 14: note = N5-(5-aminopentyl)-L-glutamine, useful for stapling/stapled with another amino acid residue comprising a side chain acid group to form a staple through the amino group in the side chain
  SITE 14: note = C-term amino
XDLXDXEAFLXFXX

SEQ ID NO: 1402 - protein, 14 aa, synthetic construct
  SITE 1: note = N-term Acetic Acid
  SITE 1: note = (R)-2-allylpyrrolidine-2-carboxylic acid, useful for stapling/stapled with another amino acid residue comprising an olefin group to form a staple through the olefin group
  VARIANT 4: note = 2-amino-2-(pent-4-en-1-yl)hept-6-enoic acid, useful for stapling/stapled with another amino acid residue comprising an olefin group to form a staple through one of the two olefin groups and/or with another amino acid residue comprising an olefin group to form a staple through the other of the two olefin groups
  SITE 6: note = (S)-3-(2-amino-2-carboxyethyl)benzoic acid
  SITE 7: note = L-glutamic acid, useful for stapling/stapled with another amino acid residue comprising a side chain amino group to form a staple through the 4-carboxyl group
  SITE 11: note (S)-3-amino-1-((pent-4-en-1-yloxy)carbonyl)pyrrolidine-3-ca rboxylic acid, useful for stapling/stapled with another amino acid residue comprising an olefin group to form a staple through the olefin group
  SITE 13: note = (S)-2-amino-3-(3,4-dichlorophenyl)propanoic acid
  SITE 14: note = N5-(5-aminopentyl)-L-glutamine, useful for stapling/stapled with another amino acid residue comprising a side chain acid group to form a staple through the amino group in the side chain
  SITE 14: note = C-term amino
XDLXDXEAFAXFXX

SEQ ID NO: 1403 - protein, 14 aa, synthetic construct
  SITE 1: note = N-term Acetic Acid
  SITE 1: note = (R)-2-allylpyrrolidine-2-carboxylic acid, useful for stapling/stapled with another amino acid residue comprising an olefin group to form a staple through the olefin group
  VARIANT 4: note = 2-amino-2-(pent-4-en-1-yl)hept-6-enoic acid, useful for stapling/stapled with another amino acid residue comprising an olefin group to form a staple through one of the two olefin groups and/or with another amino acid residue comprising an olefin group to form a staple through the other of the two olefin groups
  SITE 6: note = (S)-3-(2-amino-2-carboxyethyl)benzoic acid
  SITE 7: note = L-glutamic acid, useful for stapling/stapled with another amino acid residue comprising a side chain amino group to form a staple through the 4-carboxyl group
  SITE 11: note (S)-3-amino-1-((pent-4-en-1-yloxy)carbonyl)pyrrolidine-3-ca rboxylic acid, useful for stapling/stapled with another amino acid residue comprising an olefin group to form a staple through the olefin group
  SITE 13: note = (S)-2-amino-3-(3,4-dichlorophenyl)propanoic acid
  SITE 14: note = N5-(5-aminopentyl)-L-glutamine, useful for stapling/stapled with another amino acid residue comprising a side chain acid group to form a staple through the amino group in the side chain
  SITE 14: note = C-term amino
XDLXDXEAFVXFXX

SEQ ID NO: 1404 - protein, 14 aa, synthetic construct
  SITE 1: note = N-term Acetic Acid
  SITE 1: note = (R)-2-allylpyrrolidine-2-carboxylic acid, useful for stapling/stapled with another amino acid residue comprising an olefin group to form a staple through the olefin group
  VARIANT 4: note = 2-amino-2-(pent-4-en-1-yl)hept-6-enoic acid, useful for stapling/stapled with another amino acid residue comprising an olefin group to form a staple through one of the two olefin groups and/or with another amino acid residue comprising an olefin group to form a staple through the other of the two olefin groups
  SITE 6: note = (S)-3-(2-amino-2-carboxyethyl)benzoic acid
  SITE 7: note = L-glutamic acid, useful for stapling/stapled with another amino acid residue comprising a side chain amino group to form a staple through the 4-carboxyl group
  SITE 11: note (S)-3-amino-1-((pent-4-en-1-yloxy)carbonyl)pyrrolidine-3-ca rboxylic acid, useful for stapling/stapled with another amino acid residue comprising an olefin group to form a staple through the olefin group
  SITE 13: note = (S)-2-amino-3-(3,4-dichlorophenyl)propanoic acid
  SITE 14: note = N5-(6-aminohexyl)-L-glutamine, useful for stapling/stapled with another amino acid residue comprising a side chain acid group to form a staple through the amino group in the side chain
  SITE 14: note = C-term amino
XDLXDXEAFLXFXX

SEQ ID NO: 1405 - protein, 14 aa, synthetic construct
  SITE 1: note = N-term Acetic Acid
  SITE 1: note = (R)-2-allylpyrrolidine-2-carboxylic acid, useful for stapling/stapled with another amino acid residue comprising an olefin group to form a staple through the olefin group
  VARIANT 4: note = 2-amino-2-(pent-4-en-1-yl)hept-6-enoic acid, useful for stapling/stapled with another amino acid residue comprising an olefin group to form a staple through one of the two olefin groups and/or with another amino acid residue comprising an olefin group to form a staple through the other of the two olefin groups
  SITE 6: note = (S)-3-(2-amino-2-carboxyethyl)benzoic acid
  SITE 7: note = L-glutamic acid, useful for stapling/stapled with another amino acid residue comprising a side chain amino group to form a staple through the 4-carboxyl group
  SITE 11: note (S)-3-amino-1-((pent-4-en-1-yloxy)carbonyl)pyrrolidine-3-ca rboxylic acid, useful for stapling/stapled with another amino acid residue comprising an olefin group to form a staple through the olefin group
  SITE 13: note = (S)-2-amino-3-(3,4-dichlorophenyl)propanoic acid
  SITE 14: note = N5-(6-aminohexyl)-L-glutamine, useful for stapling/stapled with another amino acid residue comprising a side chain acid group to form a staple through the amino group in the side chain
  SITE 14: note = C-term amino
XDLXDXEAFAXFXX

SEQ ID NO: 1406 - protein, 14 aa, synthetic construct
  SITE 1: note = N-term Acetic Acid
  SITE 1: note = (R)-2-allylpyrrolidine-2-carboxylic acid, useful for stapling/stapled with another amino acid residue comprising an olefin group to form a staple through the olefin group
  VARIANT 4: note = 2-amino-2-(pent-4-en-1-yl)hept-6-enoic acid, useful for stapling/stapled with another amino acid residue comprising an olefin group to form a staple through one of the two olefin groups and/or with another amino acid residue comprising an olefin group to form a staple through the other of the two olefin groups
  SITE 6: note = (S)-3-(2-amino-2-carboxyethyl)benzoic acid
  SITE 7: note = L-glutamic acid, useful for stapling/stapled with another amino acid residue comprising a side chain amino group to form a staple through the 4-carboxyl group
  SITE 11: note (S)-3-amino-1-((pent-4-en-1-yloxy)carbonyl)pyrrolidine-3-ca rboxylic acid, useful for stapling/stapled with another amino acid residue comprising an olefin group to form a staple through the olefin group
  SITE 13: note = (S)-2-amino-3-(3,4-dichlorophenyl)propanoic acid
  SITE 14: note = N5-(6-aminohexyl)-L-glutamine, useful for stapling/stapled with another amino acid residue comprising a side chain acid group to form a staple through the amino group in the side chain
  SITE 14: note = C-term amino
XDLXDXEAFVXFXX

SEQ ID NO: 1407 - protein, 14 aa, synthetic construct
  SITE 1: note = N-term Acetic Acid
  SITE 1: note = (R)-2-allylpyrrolidine-2-carboxylic acid, useful for stapling/stapled with another amino acid residue comprising an olefin group to form a staple through the olefin group
  VARIANT 4: note = 2-amino-2-(pent-4-en-1-yl)hept-6-enoic acid, useful for stapling/stapled with another amino acid residue comprising an olefin group to form a staple through one of the two olefin groups and/or with another amino acid residue comprising an olefin group to form a staple through the other of the two olefin groups
  SITE 6: note = (S)-3-(2-amino-2-carboxyethyl)benzoic acid
  SITE 7: note = N5-((1r,4S)-4-(aminomethyl)cyclohexyl)-L-glutamine, useful for stapling/stapled with another amino acid residue comprising a side chain acid group to form a staple through the amino group in the side chain
  SITE 11: note (S)-3-amino-1-((pent-4-en-1-yloxy)carbonyl)pyrrolidine-3-ca rboxylic acid, useful for stapling/stapled with another amino acid residue comprising an olefin group to form a staple through the olefin group
  SITE 13: note = (S)-2-amino-3-(3,4-dichlorophenyl)propanoic acid
  SITE 14: note = L-glutamic acid, useful for stapling/stapled with another amino acid residue comprising a side chain amino group to form a staple through the 4-carboxyl group
  SITE 14: note = C-term amino
XDLXDXXAFLXFXE

SEQ ID NO: 1408 - protein, 14 aa, synthetic construct
  SITE 1: note = N-term Acetic Acid
  SITE 1: note = (R)-2-allylpyrrolidine-2-carboxylic acid, useful for stapling/stapled with another amino acid residue comprising an olefin group to form a staple through the olefin group
  VARIANT 4: note = 2-amino-2-(pent-4-en-1-yl)hept-6-enoic acid, useful for stapling/stapled with another amino acid residue comprising an olefin group to form a staple through one of the two olefin groups and/or with another amino acid residue comprising an olefin group to form a staple through the other of the two olefin groups
  SITE 6: note = (S)-3-(2-amino-2-carboxyethyl)benzoic acid
  SITE 7: note = N5-((1r,4S)-4-(aminomethyl)cyclohexyl)-L-glutamine, useful for stapling/stapled with another amino acid residue comprising a side chain acid group to form a staple through the amino group in the side chain
  SITE 11: note (S)-3-amino-1-((pent-4-en-1-yloxy)carbonyl)pyrrolidine-3-ca rboxylic acid, useful for stapling/stapled with another amino acid residue comprising an olefin group to form a staple through the olefin group
  SITE 13: note = (S)-2-amino-3-(3,4-dichlorophenyl)propanoic acid
  SITE 14: note = L-glutamic acid, useful for stapling/stapled with another amino acid residue comprising a side chain amino group to form a staple through the 4-carboxyl group
  SITE 14: note = C-term amino
XDLXDXXAFVXFXE

SEQ ID NO: 1409 - protein, 14 aa, synthetic construct
  SITE 1: note = N-term Acetic Acid
  SITE 1: note = (R)-2-allylpyrrolidine-2-carboxylic acid, useful for stapling/stapled with another amino acid residue comprising an olefin group to form a staple through the olefin group
  VARIANT 4: note = 2-amino-2-(pent-4-en-1-yl)hept-6-enoic acid, useful for stapling/stapled with another amino acid residue comprising an olefin group to form a staple through one of the two olefin groups and/or with another amino acid residue comprising an olefin group to form a staple through the other of the two olefin groups
  SITE 6: note = (S)-3-(2-amino-2-carboxyethyl)benzoic acid
  SITE 7: note = L-glutamic acid, useful for stapling/stapled with another amino acid residue comprising a side chain amino group to form a staple through the 4-carboxyl group
  SITE 11: note (S)-3-amino-1-((pent-4-en-1-yloxy)carbonyl)pyrrolidine-3-ca rboxylic acid, useful for stapling/stapled with another amino acid residue comprising an olefin group to form a staple through the olefin group
  SITE 13: note = (S)-2-amino-3-(3,4-dichlorophenyl)propanoic acid
  SITE 14: note = N5-((1r,4S)-4-(aminomethyl)cyclohexyl)-L-glutamine, useful for stapling/stapled with another amino acid residue comprising a side chain acid group to form a staple through the amino group in the side chain
  SITE 14: note = C-term amino
XDLXDXEAFLXFXX

SEQ ID NO: 1410 - protein, 14 aa, synthetic construct
  SITE 1: note = N-term Acetic Acid
  SITE 1: note = (R)-2-allylpyrrolidine-2-carboxylic acid, useful for stapling/stapled with another amino acid residue comprising an olefin group to form a staple through the olefin group
  VARIANT 4: note = 2-amino-2-(pent-4-en-1-yl)hept-6-enoic acid, useful for stapling/stapled with another amino acid residue comprising an olefin group to form a staple through one of the two olefin groups and/or with another amino acid residue comprising an olefin group to form a staple through the other of the two olefin groups
  SITE 6: note = (S)-3-(2-amino-2-carboxyethyl)benzoic acid
  SITE 7: note = L-glutamic acid, useful for stapling/stapled with another amino acid residue comprising a side chain amino group to form a staple through the 4-carboxyl group
  SITE 11: note (S)-3-amino-1-((pent-4-en-1-yloxy)carbonyl)pyrrolidine-3-ca rboxylic acid, useful for stapling/stapled with another amino acid residue comprising an olefin group to form a staple through the olefin group
  SITE 13: note = (S)-2-amino-3-(3,4-dichlorophenyl)propanoic acid
  SITE 14: note = N5-((1r,4S)-4-(aminomethyl)cyclohexyl)-L-glutamine, useful for stapling/stapled with another amino acid residue comprising a side chain acid group to form a staple through the amino group in the side chain
  SITE 14: note = C-term amino
XDLXDXEAFAXFXX

SEQ ID NO: 1411 - protein, 14 aa, synthetic construct
  SITE 1: note = N-term Acetic Acid
  SITE 1: note = (R)-2-allylpyrrolidine-2-carboxylic acid, useful for stapling/stapled with another amino acid residue comprising an olefin group to form a staple through the olefin group
  VARIANT 4: note = 2-amino-2-(pent-4-en-1-yl)hept-6-enoic acid, useful for stapling/stapled with another amino acid residue comprising an olefin group to form a staple through one of the two olefin groups and/or with another amino acid residue comprising an olefin group to form a staple through the other of the two olefin groups
  SITE 6: note = (S)-3-(2-amino-2-carboxyethyl)benzoic acid
  SITE 7: note = L-glutamic acid, useful for stapling/stapled with another amino acid residue comprising a side chain amino group to form a staple through the 4-carboxyl group
  SITE 11: note (S)-3-amino-1-((pent-4-en-1-yloxy)carbonyl)pyrrolidine-3-ca rboxylic acid, useful for stapling/stapled with another amino acid residue comprising an olefin group to form a staple through the olefin group
  SITE 13: note = (S)-2-amino-3-(3,4-dichlorophenyl)propanoic acid
  SITE 14: note = N5-((1r,4S)-4-(aminomethyl)cyclohexyl)-L-glutamine, useful for stapling/stapled with another amino acid residue comprising a side chain acid group to form a staple through the amino group in the side chain
  SITE 14: note = C-term amino
XDLXDXEAFVXFXX

SEQ ID NO: 1412 - protein, 14 aa, synthetic construct
  SITE 1: note = N-term Acetic Acid
  SITE 1: note = (R)-2-allylpyrrolidine-2-carboxylic acid, useful for stapling/stapled with another amino acid residue comprising an olefin group to form a staple through the olefin group
  SITE 3: note = (S)-2-amino-3,3-diphenylpropanoic acid
  VARIANT 4: note = 2-amino-2-(pent-4-en-1-yl)hept-6-enoic acid, useful for stapling/stapled with another amino acid residue comprising an olefin group to form a staple through one of the two olefin groups and/or with another amino acid residue comprising an olefin group to form a staple through the other of the two olefin groups
  SITE 6: note = (S)-3-(2-amino-2-carboxyethyl)benzoic acid
  SITE 10: note = L-lysine, useful for stapling/stapled with another amino acid residue comprising a side chain acid group to form a staple through the 6-amino group
  SITE 11: note (S)-3-amino-1-((pent-4-en-1-yloxy)carbonyl)pyrrolidine-3-ca rboxylic acid, useful for stapling/stapled with another amino acid residue comprising an olefin group to form a staple through the olefin group
  SITE 13: note = (S)-2-amino-3-(benzo[b]thiophen-3-yl)propanoic acid
  SITE 14: note = L-glutamic acid, useful for stapling/stapled with another amino acid residue comprising a side chain amino group to form a staple through the 4-carboxyl group
  SITE 14: note = C-term amino
XDXXDXAAFKXFXE

SEQ ID NO: 1413 - protein, 15 aa, synthetic construct
  SITE 1: note = N-term Acetic Acid
  SITE 1: note = (R)-2-allylpyrrolidine-2-carboxylic acid, useful for stapling/stapled with another amino acid residue comprising an olefin group to form a staple through the olefin group
  SITE 3: note = (S)-2-amino-3,3-diphenylpropanoic acid
  VARIANT 4: note = 2-amino-2-(pent-4-en-1-yl)hept-6-enoic acid, useful for stapling/stapled with another amino acid residue comprising an olefin group to form a staple through one of the two olefin groups and/or with another amino acid residue comprising an olefin group to form a staple through the other of the two olefin groups
  SITE 6: note = (S)-3-(2-amino-2-carboxyethyl)benzoic acid
  SITE 10: note = L-lysine, useful for stapling/stapled with another amino acid residue comprising a side chain acid group to form a staple through the 6-amino group
  SITE 11: note (S)-3-amino-1-((pent-4-en-1-yloxy)carbonyl)pyrrolidine-3-ca rboxylic acid, useful for stapling/stapled with another amino acid residue comprising an olefin group to form a staple through the olefin group
  SITE 13: note = (S)-2-amino-3-(benzo[b]thiophen-3-yl)propanoic acid
  SITE 14: note = L-glutamic acid, useful for stapling/stapled with another amino acid residue comprising a side chain amino group to form a staple through the 4-carboxyl group
  SITE 15: note = C-term amino
XDXXDXAAFKXFXEP

SEQ ID NO: 1414 - protein, 15 aa, synthetic construct
  SITE 1: note = N-term Acetic Acid
  SITE 1: note = (R)-2-allylpyrrolidine-2-carboxylic acid, useful for stapling/stapled with another amino acid residue comprising an olefin group to form a staple through the olefin group
  SITE 3: note = (S)-2-amino-3,3-diphenylpropanoic acid
  VARIANT 4: note = 2-amino-2-(pent-4-en-1-yl)hept-6-enoic acid, useful for stapling/stapled with another amino acid residue comprising an olefin group to form a staple through one of the two olefin groups and/or with another amino acid residue comprising an olefin group to form a staple through the other of the two olefin groups
  SITE 6: note = (S)-3-(2-amino-2-carboxyethyl)benzoic acid
  SITE 10: note = L-lysine, useful for stapling/stapled with another amino acid residue comprising a side chain acid group to form a staple through the 6-amino group
  SITE 11: note (S)-3-amino-1-((pent-4-en-1-yloxy)carbonyl)pyrrolidine-3-ca rboxylic acid, useful for stapling/stapled with another amino acid residue comprising an olefin group to form a staple through the olefin group
  SITE 13: note = (S)-2-amino-3-(benzo[b]thiophen-3-yl)propanoic acid
  SITE 14: note = L-glutamic acid, useful for stapling/stapled with another amino acid residue comprising a side chain amino group to form a staple through the 4-carboxyl group
  SITE 15: note = D-proline
  SITE 15: note = C-term amino
XDXXDXAAFKXFXEP

SEQ ID NO: 1415 - protein, 15 aa, synthetic construct
  SITE 1: note = N-term Acetic Acid
  SITE 1: note = (R)-2-allylpyrrolidine-2-carboxylic acid, useful for stapling/stapled with another amino acid residue comprising an olefin group to form a staple through the olefin group
  SITE 3: note = (S)-2-amino-3,3-diphenylpropanoic acid
  VARIANT 4: note = 2-amino-2-(pent-4-en-1-yl)hept-6-enoic acid, useful for stapling/stapled with another amino acid residue comprising an olefin group to form a staple through one of the two olefin groups and/or with another amino acid residue comprising an olefin group to form a staple through the other of the two olefin groups
  SITE 6: note = (S)-3-(2-amino-2-carboxyethyl)benzoic acid
  SITE 10: note = L-lysine, useful for stapling/stapled with another amino acid residue comprising a side chain acid group to form a staple through the 6-amino group
  SITE 11: note (S)-3-amino-1-((pent-4-en-1-yloxy)carbonyl)pyrrolidine-3-ca rboxylic acid, useful for stapling/stapled with another amino acid residue comprising an olefin group to form a staple through the olefin group
  SITE 13: note = (S)-2-amino-3-(benzo[b]thiophen-3-yl)propanoic acid
  SITE 14: note = L-glutamic acid, useful for stapling/stapled with another amino acid residue comprising a side chain amino group to form a staple through the 4-carboxyl group
  SITE 15: note = C-term amino
XDXXDXAAFKXFXES

SEQ ID NO: 1416 - protein, 15 aa, synthetic construct
  SITE 1: note = N-term Acetic Acid
  SITE 1: note = (R)-2-allylpyrrolidine-2-carboxylic acid, useful for stapling/stapled with another amino acid residue comprising an olefin group to form a staple through the olefin group
  SITE 3: note = (S)-2-amino-3,3-diphenylpropanoic acid
  VARIANT 4: note = 2-amino-2-(pent-4-en-1-yl)hept-6-enoic acid, useful for stapling/stapled with another amino acid residue comprising an olefin group to form a staple through one of the two olefin groups and/or with another amino acid residue comprising an olefin group to form a staple through the other of the two olefin groups
  SITE 6: note = (S)-3-(2-amino-2-carboxyethyl)benzoic acid
  SITE 10: note = L-lysine, useful for stapling/stapled with another amino acid residue comprising a side chain acid group to form a staple through the 6-amino group
  SITE 11: note (S)-3-amino-1-((pent-4-en-1-yloxy)carbonyl)pyrrolidine-3-ca rboxylic acid, useful for stapling/stapled with another amino acid residue comprising an olefin group to form a staple through the olefin group
  SITE 13: note = (S)-2-amino-3-(benzo[b]thiophen-3-yl)propanoic acid
  SITE 14: note = L-glutamic acid, useful for stapling/stapled with another amino acid residue comprising a side chain amino group to form a staple through the 4-carboxyl group
  SITE 15: note = C-term amino
XDXXDXAAFKXFXEV

SEQ ID NO: 1417 - protein, 15 aa, synthetic construct
  SITE 1: note = N-term Acetic Acid
  SITE 1: note = (R)-2-allylpyrrolidine-2-carboxylic acid, useful for stapling/stapled with another amino acid residue comprising an olefin group to form a staple through the olefin group
  SITE 3: note = (S)-2-amino-3,3-diphenylpropanoic acid
  VARIANT 4: note = 2-amino-2-(pent-4-en-1-yl)hept-6-enoic acid, useful for stapling/stapled with another amino acid residue comprising an olefin group to form a staple through one of the two olefin groups and/or with another amino acid residue comprising an olefin group to form a staple through the other of the two olefin groups
  SITE 6: note = (S)-3-(2-amino-2-carboxyethyl)benzoic acid
  SITE 10: note = L-lysine, useful for stapling/stapled with another amino acid residue comprising a side chain acid group to form a staple through the 6-amino group
  SITE 11: note (S)-3-amino-1-((pent-4-en-1-yloxy)carbonyl)pyrrolidine-3-ca rboxylic acid, useful for stapling/stapled with another amino acid residue comprising an olefin group to form a staple through the olefin group
  SITE 13: note = (S)-2-amino-3-(benzo[b]thiophen-3-yl)propanoic acid
  SITE 14: note = L-glutamic acid, useful for stapling/stapled with another amino acid residue comprising a side chain amino group to form a staple through the 4-carboxyl group
  SITE 15: note = D-valine
  SITE 15: note = C-term amino
XDXXDXAAFKXFXEV

SEQ ID NO: 1418 - protein, 14 aa, synthetic construct
  SITE 1: note = N-term Acetic Acid
  SITE 1: note = (R)-2-allylpyrrolidine-2-carboxylic acid, useful for stapling/stapled with another amino acid residue comprising an olefin group to form a staple through the olefin group
  SITE 3: note = (S)-2-amino-3,3-diphenylpropanoic acid
  VARIANT 4: note = 2-amino-2-(pent-4-en-1-yl)hept-6-enoic acid, useful for stapling/stapled with another amino acid residue comprising an olefin group to form a staple through one of the two olefin groups and/or with another amino acid residue comprising an olefin group to form a staple through the other of the two olefin groups
  SITE 6: note = (S)-3-(2-amino-2-carboxyethyl)benzoic acid
  SITE 10: note = L-lysine, useful for stapling/stapled with another amino acid residue comprising a side chain acid group to form a staple through the 6-amino group
  SITE 11: note (S)-3-amino-1-((pent-4-en-1-yloxy)carbonyl)pyrrolidine-3-ca rboxylic acid, useful for stapling/stapled with another amino acid residue comprising an olefin group to form a staple through the olefin group
  SITE 13: note = (S)-2-amino-3-(benzo[b]thiophen-3-yl)propanoic acid
  SITE 14: note = L-glutamic acid, useful for stapling/stapled with another amino acid residue comprising a side chain amino group to form a staple through the 4-carboxyl group
  SITE 14: note = C-term amino
XDXXDXLAFKXFXE

SEQ ID NO: 1419 - protein, 14 aa, synthetic construct
  SITE 1: note = N-term Acetic Acid
  SITE 1: note = (R)-2-allylpyrrolidine-2-carboxylic acid, useful for stapling/stapled with another amino acid residue comprising an olefin group to form a staple through the olefin group
  SITE 3: note = (S)-2-amino-3,3-diphenylpropanoic acid
  VARIANT 4: note = 2-amino-2-(pent-4-en-1-yl)hept-6-enoic acid, useful for stapling/stapled with another amino acid residue comprising an olefin group to form a staple through one of the two olefin groups and/or with another amino acid residue comprising an olefin group to form a staple through the other of the two olefin groups
  SITE 6: note = (S)-3-(2-amino-2-carboxyethyl)benzoic acid
  SITE 10: note = L-lysine, useful for stapling/stapled with another amino acid residue comprising a side chain acid group to form a staple through the 6-amino group
  SITE 11: note (S)-3-amino-1-((pent-4-en-1-yloxy)carbonyl)pyrrolidine-3-ca rboxylic acid, useful for stapling/stapled with another amino acid residue comprising an olefin group to form a staple through the olefin group
  SITE 13: note = (S)-2-amino-3-(benzo[b]thiophen-3-yl)propanoic acid
  SITE 14: note = L-glutamic acid, useful for stapling/stapled with another amino acid residue comprising a side chain amino group to form a staple through the 4-carboxyl group
  SITE 14: note = C-term amino
XDXXDXVAFKXFXE

SEQ ID NO: 1420 - protein, 14 aa, synthetic construct
  SITE 1: note = N-term Acetic Acid
  SITE 1: note = (R)-2-allylpyrrolidine-2-carboxylic acid, useful for stapling/stapled with another amino acid residue comprising an olefin group to form a staple through the olefin group
  SITE 3: note = (S)-2-amino-3,3-diphenylpropanoic acid
  VARIANT 4: note = 2-amino-2-(pent-4-en-1-yl)hept-6-enoic acid, useful for stapling/stapled with another amino acid residue comprising an olefin group to form a staple through one of the two olefin groups and/or with another amino acid residue comprising an olefin group to form a staple through the other of the two olefin groups
  SITE 6: note = (S)-3-(2-amino-2-carboxyethyl)benzoic acid
  SITE 10: note = L-lysine, useful for stapling/stapled with another amino acid residue comprising a side chain acid group to form a staple through the 6-amino group
  SITE 11: note (S)-3-amino-1-((pent-4-en-1-yloxy)carbonyl)pyrrolidine-3-ca rboxylic acid, useful for stapling/stapled with another amino acid residue comprising an olefin group to form a staple through the olefin group
  SITE 13: note = (S)-2-amino-3-(benzo[b]thiophen-3-yl)propanoic acid
  SITE 14: note = L-glutamic acid, useful for stapling/stapled with another amino acid residue comprising a side chain amino group to form a staple through the 4-carboxyl group
  SITE 14: note = C-term amino
XDXXDXTAFKXFXE

SEQ ID NO: 1421 - protein, 15 aa, synthetic construct
  SITE 1: note = N-term Acetic Acid
  SITE 1: note = (R)-2-allylpyrrolidine-2-carboxylic acid, useful for stapling/stapled with another amino acid residue comprising an olefin group to form a staple through the olefin group
  SITE 3: note = (S)-2-amino-3,3-diphenylpropanoic acid
  VARIANT 4: note = 2-amino-2-(pent-4-en-1-yl)hept-6-enoic acid, useful for stapling/stapled with another amino acid residue comprising an olefin group to form a staple through one of the two olefin groups and/or with another amino acid residue comprising an olefin group to form a staple through the other of the two olefin groups
  SITE 6: note = (S)-3-(2-amino-2-carboxyethyl)benzoic acid
  SITE 10: note = L-lysine, useful for stapling/stapled with another amino acid residue comprising a side chain acid group to form a staple through the 6-amino group
  SITE 11: note (S)-3-amino-1-((pent-4-en-1-yloxy)carbonyl)pyrrolidine-3-ca rboxylic acid, useful for stapling/stapled with another amino acid residue comprising an olefin group to form a staple through the olefin group
  SITE 13: note = (S)-2-amino-3-(benzo[b]thiophen-3-yl)propanoic acid
  SITE 14: note = L-glutamic acid, useful for stapling/stapled with another amino acid residue comprising a side chain amino group to form a staple through the 4-carboxyl group
  SITE 15: note = D-proline
  SITE 15: note = C-term amino
XDXXDXLAFKXFXEP

SEQ ID NO: 1422 - protein, 15 aa, synthetic construct
  SITE 1: note = N-term Acetic Acid
  SITE 1: note = (R)-2-allylpyrrolidine-2-carboxylic acid, useful for stapling/stapled with another amino acid residue comprising an olefin group to form a staple through the olefin group
  SITE 3: note = (S)-2-amino-3,3-diphenylpropanoic acid
  VARIANT 4: note = 2-amino-2-(pent-4-en-1-yl)hept-6-enoic acid, useful for stapling/stapled with another amino acid residue comprising an olefin group to form a staple through one of the two olefin groups and/or with another amino acid residue comprising an olefin group to form a staple through the other of the two olefin groups
  SITE 6: note = (S)-3-(2-amino-2-carboxyethyl)benzoic acid
  SITE 10: note = L-lysine, useful for stapling/stapled with another amino acid residue comprising a side chain acid group to form a staple through the 6-amino group
  SITE 11: note (S)-3-amino-1-((pent-4-en-1-yloxy)carbonyl)pyrrolidine-3-ca rboxylic acid, useful for stapling/stapled with another amino acid residue comprising an olefin group to form a staple through the olefin group
  SITE 13: note = (S)-2-amino-3-(benzo[b]thiophen-3-yl)propanoic acid
  SITE 14: note = L-glutamic acid, useful for stapling/stapled with another amino acid residue comprising a side chain amino group to form a staple through the 4-carboxyl group
  SITE 15: note = D-proline
  SITE 15: note = C-term amino
XDXXDXVAFKXFXEP

SEQ ID NO: 1423 - protein, 15 aa, synthetic construct
  SITE 1: note = N-term Acetic Acid
  SITE 1: note = (R)-2-allylpyrrolidine-2-carboxylic acid, useful for stapling/stapled with another amino acid residue comprising an olefin group to form a staple through the olefin group
  SITE 3: note = (S)-2-amino-3,3-diphenylpropanoic acid
  VARIANT 4: note = 2-amino-2-(pent-4-en-1-yl)hept-6-enoic acid, useful for stapling/stapled with another amino acid residue comprising an olefin group to form a staple through one of the two olefin groups and/or with another amino acid residue comprising an olefin group to form a staple through the other of the two olefin groups
  SITE 6: note = (S)-3-(2-amino-2-carboxyethyl)benzoic acid
  SITE 10: note = L-lysine, useful for stapling/stapled with another amino acid residue comprising a side chain acid group to form a staple through the 6-amino group
  SITE 11: note (S)-3-amino-1-((pent-4-en-1-yloxy)carbonyl)pyrrolidine-3-ca rboxylic acid, useful for stapling/stapled with another amino acid residue comprising an olefin group to form a staple through the olefin group
  SITE 13: note = (S)-2-amino-3-(benzo[b]thiophen-3-yl)propanoic acid
  SITE 14: note = L-glutamic acid, useful for stapling/stapled with another amino acid residue comprising a side chain amino group to form a staple through the 4-carboxyl group
  SITE 15: note = D-proline
  SITE 15: note = C-term amino
XDXXDXTAFKXFXEP

SEQ ID NO: 1424 - protein, 14 aa, synthetic construct
  SITE 1: note = N-term Acetic Acid
  SITE 1: note = (R)-2-allylpyrrolidine-2-carboxylic acid, useful for stapling/stapled with another amino acid residue comprising an olefin group to form a staple through the olefin group
  VARIANT 4: note = 2-amino-2-(pent-4-en-1-yl)hept-6-enoic acid, useful for stapling/stapled with another amino acid residue comprising an olefin group to form a staple through one of the two olefin groups and/or with another amino acid residue comprising an olefin group to form a staple through the other of the two olefin groups
  SITE 6: note = (S)-3-(2-amino-2-carboxyethyl)benzoic acid
  SITE 7: note = 2-amino-2-methylpropanoic acid
  SITE 10: note = L-alanine, useful for stapling/stapled with another amino acid residue comprising a triazolyl group to form a staple through the terminal methyl group
  SITE 11: note (S)-3-amino-1-((pent-4-en-1-yloxy)carbonyl)pyrrolidine-3-ca rboxylic acid, useful for stapling/stapled with another amino acid residue comprising an olefin group to form a staple through the olefin group
  SITE 13: note = (S)-2-amino-3-(3,4-dichlorophenyl)propanoic acid
  SITE 14: note = (S)-2-amino-6-(1H-1,2,3-triazol-1-yl)hexanoic acid, useful for stapling/stapled with another amino acid residue to form a staple through the 4-position of the triazolyl group
  SITE 14: note = C-term amino
XDIXDXXAFAXFXX

SEQ ID NO: 1425 - protein, 14 aa, synthetic construct
  SITE 1: note = N-term Acetic Acid
  SITE 1: note = (R)-2-allylpyrrolidine-2-carboxylic acid, useful for stapling/stapled with another amino acid residue comprising an olefin group to form a staple through the olefin group
  VARIANT 4: note = 2-amino-2-(pent-4-en-1-yl)hept-6-enoic acid, useful for stapling/stapled with another amino acid residue comprising an olefin group to form a staple through one of the two olefin groups and/or with another amino acid residue comprising an olefin group to form a staple through the other of the two olefin groups
  SITE 6: note = (S)-3-(2-amino-2-carboxyethyl)benzoic acid
  SITE 7: note = 2-amino-2-methylpropanoic acid
  SITE 10: note = (S)-2-amino-6-(1H-1,2,3-triazol-1-yl)hexanoic acid, useful for stapling/stapled with another amino acid residue to form a staple through the 4-position of the triazolyl group
  SITE 11: note (S)-3-amino-1-((pent-4-en-1-yloxy)carbonyl)pyrrolidine-3-ca rboxylic acid, useful for stapling/stapled with another amino acid residue comprising an olefin group to form a staple through the olefin group
  SITE 13: note = (S)-2-amino-3-(3,4-dichlorophenyl)propanoic acid
  SITE 14: note = O-methyl-L-serine, useful for stapling/stapled with another amino acid residue comprising a triazolyl group to form a staple through the terminal methyl group
  SITE 14: note = C-term amino
XDIXDXXAFXXFXS

SEQ ID NO: 1426 - protein, 14 aa, synthetic construct
  SITE 1: note = N-term Acetic Acid
  SITE 1: note = (R)-2-allylpyrrolidine-2-carboxylic acid, useful for stapling/stapled with another amino acid residue comprising an olefin group to form a staple through the olefin group
  VARIANT 4: note = 2-amino-2-(pent-4-en-1-yl)hept-6-enoic acid, useful for stapling/stapled with another amino acid residue comprising an olefin group to form a staple through one of the two olefin groups and/or with another amino acid residue comprising an olefin group to form a staple through the other of the two olefin groups
  SITE 6: note = (S)-3-(2-amino-2-carboxyethyl)benzoic acid
  SITE 7: note = 2-amino-2-methylpropanoic acid
  SITE 10: note = O-methyl-L-serine, useful for stapling/stapled with another amino acid residue comprising a triazolyl group to form a staple through the terminal methyl group
  SITE 11: note (S)-3-amino-1-((pent-4-en-1-yloxy)carbonyl)pyrrolidine-3-ca rboxylic acid, useful for stapling/stapled with another amino acid residue comprising an olefin group to form a staple through the olefin group
  SITE 13: note = (S)-2-amino-3-(3,4-dichlorophenyl)propanoic acid
  SITE 14: note = (S)-2-amino-6-(1H-1,2,3-triazol-1-yl)hexanoic acid, useful for stapling/stapled with another amino acid residue to form a staple through the 4-position of the triazolyl group
  SITE 14: note = C-term amino
XDIXDXXAFSXFXX

SEQ ID NO: 1427 - protein, 14 aa, synthetic construct
  SITE 1: note = N-term Acetic Acid
  SITE 1: note = (R)-2-allylpyrrolidine-2-carboxylic acid, useful for stapling/stapled with another amino acid residue comprising an olefin group to form a staple through the olefin group
  VARIANT 4: note = 2-amino-2-(pent-4-en-1-yl)hept-6-enoic acid, useful for stapling/stapled with another amino acid residue comprising an olefin group to form a staple through one of the two olefin groups and/or with another amino acid residue comprising an olefin group to form a staple through the other of the two olefin groups
  SITE 6: note = (S)-3-(2-amino-2-carboxyethyl)benzoic acid
  SITE 7: note = 2-amino-2-methylpropanoic acid
  SITE 10: note = (S)-2-amino-5-(1H-1,2,3-triazol-1-yl)pentanoic acid, useful for stapling/stapled with another amino acid residue to form a staple through the 4-position of the triazolyl group
  SITE 11: note (S)-3-amino-1-((pent-4-en-1-yloxy)carbonyl)pyrrolidine-3-ca rboxylic acid, useful for stapling/stapled with another amino acid residue comprising an olefin group to form a staple through the olefin group
  SITE 13: note = (S)-2-amino-3-(3,4-dichlorophenyl)propanoic acid
  SITE 14: note = O-methyl-L-serine, useful for stapling/stapled with another amino acid residue comprising a triazolyl group to form a staple through the terminal methyl group
  SITE 14: note = C-term amino
XDIXDXXAFXXFXS

SEQ ID NO: 1428 - protein, 14 aa, synthetic construct
  SITE 1: note = N-term Acetic Acid
  SITE 1: note = (R)-2-allylpyrrolidine-2-carboxylic acid, useful for stapling/stapled with another amino acid residue comprising an olefin group to form a staple through the olefin group
  VARIANT 4: note = 2-amino-2-(pent-4-en-1-yl)hept-6-enoic acid, useful for stapling/stapled with another amino acid residue comprising an olefin group to form a staple through one of the two olefin groups and/or with another amino acid residue comprising an olefin group to form a staple through the other of the two olefin groups
  SITE 6: note = (S)-3-(2-amino-2-carboxyethyl)benzoic acid
  SITE 7: note = 2-amino-2-methylpropanoic acid
  SITE 10: note = O-methyl-L-serine, useful for stapling/stapled with another amino acid residue comprising a triazolyl group to form a staple through the terminal methyl group
  SITE 11: note (S)-3-amino-1-((pent-4-en-1-yloxy)carbonyl)pyrrolidine-3-ca rboxylic acid, useful for stapling/stapled with another amino acid residue comprising an olefin group to form a staple through the olefin group
  SITE 13: note = (S)-2-amino-3-(3,4-dichlorophenyl)propanoic acid
  SITE 14: note = (S)-2-amino-5-(1H-1,2,3-triazol-1-yl)pentanoic acid, useful for stapling/stapled with another amino acid residue to form a staple through the 4-position of the triazolyl group
  SITE 14: note = C-term amino
XDIXDXXAFSXFXX

SEQ ID NO: 1429 - protein, 14 aa, synthetic construct
  SITE 1: note = N-term Acetic Acid
  SITE 1: note = (R)-2-allylpyrrolidine-2-carboxylic acid, useful for stapling/stapled with another amino acid residue comprising an olefin group to form a staple through the olefin group
  VARIANT 4: note = 2-amino-2-(pent-4-en-1-yl)hept-6-enoic acid, useful for stapling/stapled with another amino acid residue comprising an olefin group to form a staple through one of the two olefin groups and/or with another amino acid residue comprising an olefin group to form a staple through the other of the two olefin groups
  SITE 6: note = (S)-3-(2-amino-2-carboxyethyl)benzoic acid
  SITE 10: note = (S)-2-amino-6-(1H-1,2,3-triazol-1-yl)hexanoic acid, useful for stapling/stapled with another amino acid residue to form a staple through the 4-position of the triazolyl group
  SITE 11: note (S)-3-amino-1-((pent-4-en-1-yloxy)carbonyl)pyrrolidine-3-ca rboxylic acid, useful for stapling/stapled with another amino acid residue comprising an olefin group to form a staple through the olefin group
  SITE 13: note = (S)-2-amino-3-(3,4-dichlorophenyl)propanoic acid
  SITE 14: note = L-alanine, useful for stapling/stapled with another amino acid residue comprising a triazolyl group to form a staple through the terminal methyl group
  SITE 14: note = C-term amino
XDIXDXAAFXXFXA

SEQ ID NO: 1430 - protein, 14 aa, synthetic construct
  SITE 1: note = N-term Acetic Acid
  SITE 1: note = (R)-2-allylpyrrolidine-2-carboxylic acid, useful for stapling/stapled with another amino acid residue comprising an olefin group to form a staple through the olefin group
  VARIANT 4: note = 2-amino-2-(pent-4-en-1-yl)hept-6-enoic acid, useful for stapling/stapled with another amino acid residue comprising an olefin group to form a staple through one of the two olefin groups and/or with another amino acid residue comprising an olefin group to form a staple through the other of the two olefin groups
  SITE 6: note = (S)-3-(2-amino-2-carboxyethyl)benzoic acid
  SITE 10: note = L-alanine, useful for stapling/stapled with another amino acid residue comprising a triazolyl group to form a staple through the terminal methyl group
  SITE 11: note (S)-3-amino-1-((pent-4-en-1-yloxy)carbonyl)pyrrolidine-3-ca rboxylic acid, useful for stapling/stapled with another amino acid residue comprising an olefin group to form a staple through the olefin group
  SITE 13: note = (S)-2-amino-3-(3,4-dichlorophenyl)propanoic acid
  SITE 14: note = (S)-2-amino-6-(1H-1,2,3-triazol-1-yl)hexanoic acid, useful for stapling/stapled with another amino acid residue to form a staple through the 4-position of the triazolyl group
  SITE 14: note = C-term amino
XDIXDXAAFAXFXX

SEQ ID NO: 1431 - protein, 14 aa, synthetic construct
  SITE 1: note = N-term Acetic Acid
  SITE 1: note = (R)-2-allylpyrrolidine-2-carboxylic acid, useful for stapling/stapled with another amino acid residue comprising an olefin group to form a staple through the olefin group
  VARIANT 4: note = 2-amino-2-(pent-4-en-1-yl)hept-6-enoic acid, useful for stapling/stapled with another amino acid residue comprising an olefin group to form a staple through one of the two olefin groups and/or with another amino acid residue comprising an olefin group to form a staple through the other of the two olefin groups
  SITE 6: note = (S)-3-(2-amino-2-carboxyethyl)benzoic acid
  SITE 10: note = (S)-2-amino-6-(1H-1,2,3-triazol-1-yl)hexanoic acid, useful for stapling/stapled with another amino acid residue to form a staple through the 4-position of the triazolyl group
  SITE 11: note (S)-3-amino-1-((pent-4-en-1-yloxy)carbonyl)pyrrolidine-3-ca rboxylic acid, useful for stapling/stapled with another amino acid residue comprising an olefin group to form a staple through the olefin group
  SITE 13: note = (S)-2-amino-3-(3,4-dichlorophenyl)propanoic acid
  SITE 14: note = O-methyl-L-serine, useful for stapling/stapled with another amino acid residue comprising a triazolyl group to form a staple through the terminal methyl group
  SITE 14: note = C-term amino
XDIXDXAAFXXFXS

SEQ ID NO: 1432 - protein, 14 aa, synthetic construct
  SITE 1: note = N-term Acetic Acid
  SITE 1: note = (R)-2-allylpyrrolidine-2-carboxylic acid, useful for stapling/stapled with another amino acid residue comprising an olefin group to form a staple through the olefin group
  VARIANT 4: note = 2-amino-2-(pent-4-en-1-yl)hept-6-enoic acid, useful for stapling/stapled with another amino acid residue comprising an olefin group to form a staple through one of the two olefin groups and/or with another amino acid residue comprising an olefin group to form a staple through the other of the two olefin groups
  SITE 6: note = (S)-3-(2-amino-2-carboxyethyl)benzoic acid
  SITE 10: note = O-methyl-L-serine, useful for stapling/stapled with another amino acid residue comprising a triazolyl group to form a staple through the terminal methyl group
  SITE 11: note (S)-3-amino-1-((pent-4-en-1-yloxy)carbonyl)pyrrolidine-3-ca rboxylic acid, useful for stapling/stapled with another amino acid residue comprising an olefin group to form a staple through the olefin group
  SITE 13: note = (S)-2-amino-3-(3,4-dichlorophenyl)propanoic acid
  SITE 14: note = (S)-2-amino-6-(1H-1,2,3-triazol-1-yl)hexanoic acid, useful for stapling/stapled with another amino acid residue to form a staple through the 4-position of the triazolyl group
  SITE 14: note = C-term amino
XDIXDXAAFSXFXX

SEQ ID NO: 1433 - protein, 14 aa, synthetic construct
  SITE 1: note = N-term Acetic Acid
  SITE 1: note = (R)-2-allylpyrrolidine-2-carboxylic acid, useful for stapling/stapled with another amino acid residue comprising an olefin group to form a staple through the olefin group
  VARIANT 4: note = 2-amino-2-(pent-4-en-1-yl)hept-6-enoic acid, useful for stapling/stapled with another amino acid residue comprising an olefin group to form a staple through one of the two olefin groups and/or with another amino acid residue comprising an olefin group to form a staple through the other of the two olefin groups
  SITE 6: note = (S)-3-(2-amino-2-carboxyethyl)benzoic acid
  SITE 10: note = (S)-2-amino-5-(1H-1,2,3-triazol-1-yl)pentanoic acid, useful for stapling/stapled with another amino acid residue to form a staple through the 4-position of the triazolyl group
  SITE 11: note (S)-3-amino-1-((pent-4-en-1-yloxy)carbonyl)pyrrolidine-3-ca rboxylic acid, useful for stapling/stapled with another amino acid residue comprising an olefin group to form a staple through the olefin group
  SITE 13: note = (S)-2-amino-3-(3,4-dichlorophenyl)propanoic acid
  SITE 14: note = O-methyl-L-serine, useful for stapling/stapled with another amino acid residue comprising a triazolyl group to form a staple through the terminal methyl group
  SITE 14: note = C-term amino
XDIXDXAAFXXFXS

SEQ ID NO: 1434 - protein, 14 aa, synthetic construct
  SITE 1: note = N-term Acetic Acid
  SITE 1: note = (R)-2-allylpyrrolidine-2-carboxylic acid, useful for stapling/stapled with another amino acid residue comprising an olefin group to form a staple through the olefin group
  VARIANT 4: note = 2-amino-2-(pent-4-en-1-yl)hept-6-enoic acid, useful for stapling/stapled with another amino acid residue comprising an olefin group to form a staple through one of the two olefin groups and/or with another amino acid residue comprising an olefin group to form a staple through the other of the two olefin groups
  SITE 6: note = (S)-3-(2-amino-2-carboxyethyl)benzoic acid
  SITE 10: note = O-methyl-L-serine, useful for stapling/stapled with another amino acid residue comprising a triazolyl group to form a staple through the terminal methyl group
  SITE 11: note (S)-3-amino-1-((pent-4-en-1-yloxy)carbonyl)pyrrolidine-3-ca rboxylic acid, useful for stapling/stapled with another amino acid residue comprising an olefin group to form a staple through the olefin group
  SITE 13: note = (S)-2-amino-3-(3,4-dichlorophenyl)propanoic acid
  SITE 14: note = (S)-2-amino-5-(1H-1,2,3-triazol-1-yl)pentanoic acid, useful for stapling/stapled with another amino acid residue to form a staple through the 4-position of the triazolyl group
  SITE 14: note = C-term amino
XDIXDXAAFSXFXX

SEQ ID NO: 1435 - protein, 15 aa, synthetic construct
  SITE 1: note = N-term Acetic Acid
  SITE 1: note = (S)-2-amino-2-methylhept-6-enoic acid, useful for stapling/stapled with another amino acid residue comprising an olefin group to form a staple through the olefin group
  SITE 4: note = (S)-2-amino-3,3-diphenylpropanoic acid
  VARIANT 5: note = 2-amino-2-(pent-4-en-1-yl)hept-6-enoic acid, useful for stapling/stapled with another amino acid residue comprising an olefin group to form a staple through one of the two olefin groups and/or with another amino acid residue comprising an olefin group to form a staple through the other of the two olefin groups
  SITE 7: note = (S)-3-(2-amino-2-carboxyethyl)benzoic acid
  SITE 8: note = 2-amino-2-methylpropanoic acid
  SITE 11: note = L-lysine, useful for stapling/stapled with another amino acid residue comprising a side chain acid group to form a staple through the 6-amino group
  SITE 12: note (S)-3-amino-1-((but-3-en-1-yloxy)carbonyl)pyrrolidine-3-car boxylic acid, useful for stapling/stapled with another amino acid residue comprising an olefin group to form a staple through the olefin group
  SITE 13: note = (S)-2-amino-3-(thiophen-3-yl)propanoic acid
  SITE 14: note = (S)-2-amino-3-(benzo[b]thiophen-3-yl)propanoic acid
  SITE 15: note = L-glutamic acid, useful for stapling/stapled with another amino acid residue comprising a side chain amino group to form a staple through the 4-carboxyl group
  SITE 15: note = C-term amino
XDDXXDXXAFKXXXE

SEQ ID NO: 1436 - protein, 15 aa, synthetic construct
  SITE 1: note = N-term Acetic Acid
  SITE 1: note = (S)-2-amino-2-methylhept-6-enoic acid, useful for stapling/stapled with another amino acid residue comprising an olefin group to form a staple through the olefin group
  SITE 4: note = (S)-2-amino-3,3-diphenylpropanoic acid
  VARIANT 5: note = 2-amino-2-(pent-4-en-1-yl)hept-6-enoic acid, useful for stapling/stapled with another amino acid residue comprising an olefin group to form a staple through one of the two olefin groups and/or with another amino acid residue comprising an olefin group to form a staple through the other of the two olefin groups
  SITE 7: note = (S)-3-(2-amino-2-carboxyethyl)benzoic acid
  SITE 8: note = 2-amino-2-methylpropanoic acid
  SITE 11: note = L-lysine, useful for stapling/stapled with another amino acid residue comprising a side chain acid group to form a staple through the 6-amino group
  SITE 12: note (S)-3-amino-1-((but-3-en-1-yloxy)carbonyl)pyrrolidine-3-car boxylic acid, useful for stapling/stapled with another amino acid residue comprising an olefin group to form a staple through the olefin group
  SITE 13: note = (S)-2-amino-3-(thiophen-3-yl)propanoic acid
  SITE 14: note = (S)-2-amino-3-(benzo[b]thiophen-3-yl)propanoic acid
  SITE 15: note = L-glutamic acid, useful for stapling/stapled with another amino acid residue comprising a side chain amino group to form a staple through the 4-carboxyl group
  SITE 15: note = C-term amino
XEDXXDXXAFKXXXE

SEQ ID NO: 1437 - protein, 15 aa, synthetic construct
  SITE 1: note = N-term Acetic Acid
  SITE 1: note = (S)-2-amino-2-methylhept-6-enoic acid, useful for stapling/stapled with another amino acid residue comprising an olefin group to form a staple through the olefin group
  SITE 2: note = N6-acetyl-L-lysine
  SITE 4: note = (S)-2-amino-3,3-diphenylpropanoic acid
  VARIANT 5: note = 2-amino-2-(pent-4-en-1-yl)hept-6-enoic acid, useful for stapling/stapled with another amino acid residue comprising an olefin group to form a staple through one of the two olefin groups and/or with another amino acid residue comprising an olefin group to form a staple through the other of the two olefin groups
  SITE 7: note = (S)-3-(2-amino-2-carboxyethyl)benzoic acid
  SITE 8: note = 2-amino-2-methylpropanoic acid
  SITE 11: note = L-lysine, useful for stapling/stapled with another amino acid residue comprising a side chain acid group to form a staple through the 6-amino group
  SITE 12: note (S)-3-amino-1-((but-3-en-1-yloxy)carbonyl)pyrrolidine-3-car boxylic acid, useful for stapling/stapled with another amino acid residue comprising an olefin group to form a staple through the olefin group
  SITE 13: note = (S)-2-amino-3-(thiophen-3-yl)propanoic acid
  SITE 14: note = (S)-2-amino-3-(benzo[b]thiophen-3-yl)propanoic acid
  SITE 15: note = L-glutamic acid, useful for stapling/stapled with another amino acid residue comprising a side chain amino group to form a staple through the 4-carboxyl group
  SITE 15: note = C-term amino
XKDXXDXXAFKXXXE

SEQ ID NO: 1438 - protein, 15 aa, synthetic construct
  SITE 1: note = N-term Acetic Acid
  SITE 1: note = (S)-2-amino-2-methylhept-6-enoic acid, useful for stapling/stapled with another amino acid residue comprising an olefin group to form a staple through the olefin group
  SITE 4: note = (S)-2-amino-3,3-diphenylpropanoic acid
  VARIANT 5: note = 2-amino-2-(pent-4-en-1-yl)hept-6-enoic acid, useful for stapling/stapled with another amino acid residue comprising an olefin group to form a staple through one of the two olefin groups and/or with another amino acid residue comprising an olefin group to form a staple through the other of the two olefin groups
  SITE 7: note = (S)-3-(2-amino-2-carboxyethyl)benzoic acid
  SITE 8: note = 2-amino-2-methylpropanoic acid
  SITE 11: note = L-lysine, useful for stapling/stapled with another amino acid residue comprising a side chain acid group to form a staple through the 6-amino group
  SITE 12: note (S)-3-amino-1-((but-3-en-1-yloxy)carbonyl)pyrrolidine-3-car boxylic acid, useful for stapling/stapled with another amino acid residue comprising an olefin group to form a staple through the olefin group
  SITE 13: note = (S)-2-amino-3-(thiophen-3-yl)propanoic acid
  SITE 14: note = (S)-2-amino-3-(benzo[b]thiophen-3-yl)propanoic acid
  SITE 15: note = L-glutamic acid, useful for stapling/stapled with another amino acid residue comprising a side chain amino group to form a staple through the 4-carboxyl group
  SITE 15: note = C-term amino
XLDXXDXXAFKXXXE

SEQ ID NO: 1439 - protein, 15 aa, synthetic construct
  SITE 1: note = N-term Acetic Acid
  SITE 1: note = (S)-2-amino-2-methylhept-6-enoic acid, useful for stapling/stapled with another amino acid residue comprising an olefin group to form a staple through the olefin group
  SITE 2: note = (S)-3-(2-amino-2-carboxyethyl)benzoic acid
  SITE 4: note = (S)-2-amino-3,3-diphenylpropanoic acid
  VARIANT 5: note = 2-amino-2-(pent-4-en-1-yl)hept-6-enoic acid, useful for stapling/stapled with another amino acid residue comprising an olefin group to form a staple through one of the two olefin groups and/or with another amino acid residue comprising an olefin group to form a staple through the other of the two olefin groups
  SITE 7: note = (S)-3-(2-amino-2-carboxyethyl)benzoic acid
  SITE 8: note = 2-amino-2-methylpropanoic acid
  SITE 11: note = L-lysine, useful for stapling/stapled with another amino acid residue comprising a side chain acid group to form a staple through the 6-amino group
  SITE 12: note (S)-3-amino-1-((but-3-en-1-yloxy)carbonyl)pyrrolidine-3-car boxylic acid, useful for stapling/stapled with another amino acid residue comprising an olefin group to form a staple through the olefin group
  SITE 13: note = (S)-2-amino-3-(thiophen-3-yl)propanoic acid
  SITE 14: note = (S)-2-amino-3-(benzo[b]thiophen-3-yl)propanoic acid
  SITE 15: note = L-glutamic acid, useful for stapling/stapled with another amino acid residue comprising a side chain amino group to form a staple through the 4-carboxyl group
  SITE 15: note = C-term amino
XXDXXDXXAFKXXXE

SEQ ID NO: 1440 - protein, 15 aa, synthetic construct
  SITE 1: note = N-term Acetic Acid
  SITE 1: note = (S)-2-amino-2-methylhept-6-enoic acid, useful for stapling/stapled with another amino acid residue comprising an olefin group to form a staple through the olefin group
  SITE 4: note = (S)-2-amino-3,3-diphenylpropanoic acid
  VARIANT 5: note = 2-amino-2-(pent-4-en-1-yl)hept-6-enoic acid, useful for stapling/stapled with another amino acid residue comprising an olefin group to form a staple through one of the two olefin groups and/or with another amino acid residue comprising an olefin group to form a staple through the other of the two olefin groups
  SITE 7: note = (S)-3-(2-amino-2-carboxyethyl)benzoic acid
  SITE 8: note = 2-amino-2-methylpropanoic acid
  SITE 11: note = L-lysine, useful for stapling/stapled with another amino acid residue comprising a side chain acid group to form a staple through the 6-amino group
  SITE 12: note (S)-3-amino-1-((but-3-en-1-yloxy)carbonyl)pyrrolidine-3-car boxylic acid, useful for stapling/stapled with another amino acid residue comprising an olefin group to form a staple through the olefin group
  SITE 13: note = (S)-2-amino-3-(thiophen-3-yl)propanoic acid
  SITE 14: note = (S)-2-amino-3-(benzo[b]thiophen-3-yl)propanoic acid
  SITE 15: note = L-glutamic acid, useful for stapling/stapled with another amino acid residue comprising a side chain amino group to form a staple through the 4-carboxyl group
  SITE 15: note = C-term amino
XADXXDXXAFKXXXE

SEQ ID NO: 1441 - protein, 15 aa, synthetic construct
  SITE 1: note = N-term Acetic Acid
  SITE 1: note = (S)-2-amino-2-methylhept-6-enoic acid, useful for stapling/stapled with another amino acid residue comprising an olefin group to form a staple through the olefin group
  VARIANT 5: note = 2-amino-2-(pent-4-en-1-yl)hept-6-enoic acid, useful for stapling/stapled with another amino acid residue comprising an olefin group to form a staple through one of the two olefin groups and/or with another amino acid residue comprising an olefin group to form a staple through the other of the two olefin groups
  SITE 7: note = (S)-3-(2-amino-2-carboxyethyl)benzoic acid
  SITE 8: note = 2-amino-2-methylpropanoic acid
  SITE 11: note = L-lysine, useful for stapling/stapled with another amino acid residue comprising a side chain acid group to form a staple through the 6-amino group
  SITE 12: note (S)-3-amino-1-((but-3-en-1-yloxy)carbonyl)pyrrolidine-3-car boxylic acid, useful for stapling/stapled with another amino acid residue comprising an olefin group to form a staple through the olefin group
  SITE 13: note = (S)-2-amino-3-(thiophen-3-yl)propanoic acid
  SITE 14: note = (S)-2-amino-3-(benzo[b]thiophen-3-yl)propanoic acid
  SITE 15: note = L-glutamic acid, useful for stapling/stapled with another amino acid residue comprising a side chain amino group to form a staple through the 4-carboxyl group
  SITE 15: note = C-term amino
XDDVXDXXAFKXXXE

SEQ ID NO: 1442 - protein, 15 aa, synthetic construct
  SITE 1: note = N-term Acetic Acid
  SITE 1: note = (S)-2-amino-2-methylhept-6-enoic acid, useful for stapling/stapled with another amino acid residue comprising an olefin group to form a staple through the olefin group
  VARIANT 5: note = 2-amino-2-(pent-4-en-1-yl)hept-6-enoic acid, useful for stapling/stapled with another amino acid residue comprising an olefin group to form a staple through one of the two olefin groups and/or with another amino acid residue comprising an olefin group to form a staple through the other of the two olefin groups
  SITE 7: note = (S)-3-(2-amino-2-carboxyethyl)benzoic acid
  SITE 8: note = 2-amino-2-methylpropanoic acid
  SITE 11: note = L-lysine, useful for stapling/stapled with another amino acid residue comprising a side chain acid group to form a staple through the 6-amino group
  SITE 12: note (S)-3-amino-1-((but-3-en-1-yloxy)carbonyl)pyrrolidine-3-car boxylic acid, useful for stapling/stapled with another amino acid residue comprising an olefin group to form a staple through the olefin group
  SITE 13: note = (S)-2-amino-3-(thiophen-3-yl)propanoic acid
  SITE 14: note = (S)-2-amino-3-(benzo[b]thiophen-3-yl)propanoic acid
  SITE 15: note = L-glutamic acid, useful for stapling/stapled with another amino acid residue comprising a side chain amino group to form a staple through the 4-carboxyl group
  SITE 15: note = C-term amino
XEDVXDXXAFKXXXE

SEQ ID NO: 1443 - protein, 15 aa, synthetic construct
  SITE 1: note = N-term Acetic Acid
  SITE 1: note = (S)-2-amino-2-methylhept-6-enoic acid, useful for stapling/stapled with another amino acid residue comprising an olefin group to form a staple through the olefin group
  SITE 2: note = N6-acetyl-L-lysine
  VARIANT 5: note = 2-amino-2-(pent-4-en-1-yl)hept-6-enoic acid, useful for stapling/stapled with another amino acid residue comprising an olefin group to form a staple through one of the two olefin groups and/or with another amino acid residue comprising an olefin group to form a staple through the other of the two olefin groups
  SITE 7: note = (S)-3-(2-amino-2-carboxyethyl)benzoic acid
  SITE 8: note = 2-amino-2-methylpropanoic acid
  SITE 11: note = L-lysine, useful for stapling/stapled with another amino acid residue comprising a side chain acid group to form a staple through the 6-amino group
  SITE 12: note (S)-3-amino-1-((but-3-en-1-yloxy)carbonyl)pyrrolidine-3-car boxylic acid, useful for stapling/stapled with another amino acid residue comprising an olefin group to form a staple through the olefin group
  SITE 13: note = (S)-2-amino-3-(thiophen-3-yl)propanoic acid
  SITE 14: note = (S)-2-amino-3-(benzo[b]thiophen-3-yl)propanoic acid
  SITE 15: note = L-glutamic acid, useful for stapling/stapled with another amino acid residue comprising a side chain amino group to form a staple through the 4-carboxyl group
  SITE 15: note = C-term amino
XKDVXDXXAFKXXXE

SEQ ID NO: 1444 - protein, 15 aa, synthetic construct
  SITE 1: note = N-term Acetic Acid
  SITE 1: note = (S)-2-amino-2-methylhept-6-enoic acid, useful for stapling/stapled with another amino acid residue comprising an olefin group to form a staple through the olefin group
  VARIANT 5: note = 2-amino-2-(pent-4-en-1-yl)hept-6-enoic acid, useful for stapling/stapled with another amino acid residue comprising an olefin group to form a staple through one of the two olefin groups and/or with another amino acid residue comprising an olefin group to form a staple through the other of the two olefin groups
  SITE 7: note = (S)-3-(2-amino-2-carboxyethyl)benzoic acid
  SITE 8: note = 2-amino-2-methylpropanoic acid
  SITE 11: note = L-lysine, useful for stapling/stapled with another amino acid residue comprising a side chain acid group to form a staple through the 6-amino group
  SITE 12: note (S)-3-amino-1-((but-3-en-1-yloxy)carbonyl)pyrrolidine-3-car boxylic acid, useful for stapling/stapled with another amino acid residue comprising an olefin group to form a staple through the olefin group
  SITE 13: note = (S)-2-amino-3-(thiophen-3-yl)propanoic acid
  SITE 14: note = (S)-2-amino-3-(benzo[b]thiophen-3-yl)propanoic acid
  SITE 15: note = L-glutamic acid, useful for stapling/stapled with another amino acid residue comprising a side chain amino group to form a staple through the 4-carboxyl group
  SITE 15: note = C-term amino
XLDVXDXXAFKXXXE

SEQ ID NO: 1445 - protein, 15 aa, synthetic construct
  SITE 1: note = N-term Acetic Acid
  SITE 1: note = (S)-2-amino-2-methylhept-6-enoic acid, useful for stapling/stapled with another amino acid residue comprising an olefin group to form a staple through the olefin group
  SITE 2: note = (S)-3-(2-amino-2-carboxyethyl)benzoic acid
  VARIANT 5: note = 2-amino-2-(pent-4-en-1-yl)hept-6-enoic acid, useful for stapling/stapled with another amino acid residue comprising an olefin group to form a staple through one of the two olefin groups and/or with another amino acid residue comprising an olefin group to form a staple through the other of the two olefin groups
  SITE 7: note = (S)-3-(2-amino-2-carboxyethyl)benzoic acid
  SITE 8: note = 2-amino-2-methylpropanoic acid
  SITE 11: note = L-lysine, useful for stapling/stapled with another amino acid residue comprising a side chain acid group to form a staple through the 6-amino group
  SITE 12: note (S)-3-amino-1-((but-3-en-1-yloxy)carbonyl)pyrrolidine-3-car boxylic acid, useful for stapling/stapled with another amino acid residue comprising an olefin group to form a staple through the olefin group
  SITE 13: note = (S)-2-amino-3-(thiophen-3-yl)propanoic acid
  SITE 14: note = (S)-2-amino-3-(benzo[b]thiophen-3-yl)propanoic acid
  SITE 15: note = L-glutamic acid, useful for stapling/stapled with another amino acid residue comprising a side chain amino group to form a staple through the 4-carboxyl group
  SITE 15: note = C-term amino
XXDVXDXXAFKXXXE

SEQ ID NO: 1446 - protein, 15 aa, synthetic construct
  SITE 1: note = N-term Acetic Acid
  SITE 1: note = (S)-2-amino-2-methylhept-6-enoic acid, useful for stapling/stapled with another amino acid residue comprising an olefin group to form a staple through the olefin group
  VARIANT 5: note = 2-amino-2-(pent-4-en-1-yl)hept-6-enoic acid, useful for stapling/stapled with another amino acid residue comprising an olefin group to form a staple through one of the two olefin groups and/or with another amino acid residue comprising an olefin group to form a staple through the other of the two olefin groups
  SITE 7: note = (S)-3-(2-amino-2-carboxyethyl)benzoic acid
  SITE 8: note = 2-amino-2-methylpropanoic acid
  SITE 11: note = L-lysine, useful for stapling/stapled with another amino acid residue comprising a side chain acid group to form a staple through the 6-amino group
  SITE 12: note (S)-3-amino-1-((but-3-en-1-yloxy)carbonyl)pyrrolidine-3-car boxylic acid, useful for stapling/stapled with another amino acid residue comprising an olefin group to form a staple through the olefin group
  SITE 13: note = (S)-2-amino-3-(thiophen-3-yl)propanoic acid
  SITE 14: note = (S)-2-amino-3-(benzo[b]thiophen-3-yl)propanoic acid
  SITE 15: note = L-glutamic acid, useful for stapling/stapled with another amino acid residue comprising a side chain amino group to form a staple through the 4-carboxyl group
  SITE 15: note = C-term amino
XADVXDXXAFKXXXE

SEQ ID NO: 1447 - protein, 16 aa, synthetic construct
  SITE 1: note = N-term Acetic Acid
  SITE 2: note = (S)-2-amino-2-methylhept-6-enoic acid, useful for stapling/stapled with another amino acid residue comprising an olefin group to form a staple through the olefin group
  VARIANT 6: note = 2-amino-2-(pent-4-en-1-yl)hept-6-enoic acid, useful for stapling/stapled with another amino acid residue comprising an olefin group to form a staple through one of the two olefin groups and/or with another amino acid residue comprising an olefin group to form a staple through the other of the two olefin groups
  SITE 8: note = (S)-3-(2-amino-2-carboxyethyl)benzoic acid
  SITE 9: note = 2-amino-2-methylpropanoic acid
  SITE 12: note = L-lysine, useful for stapling/stapled with another amino acid residue comprising a side chain acid group to form a staple through the 6-amino group
  SITE 13: note (S)-3-amino-1-((but-3-en-1-yloxy)carbonyl)pyrrolidine-3-car boxylic acid, useful for stapling/stapled with another amino acid residue comprising an olefin group to form a staple through the olefin group
  SITE 15: note = (S)-2-amino-3-(3,4-dichlorophenyl)propanoic acid
  SITE 16: note = L-glutamic acid, useful for stapling/stapled with another amino acid residue comprising a side chain amino group to form a staple through the 4-carboxyl group
  SITE 16: note = C-term amino
PXADLXDXXAFKXFXE

SEQ ID NO: 1448 - protein, 16 aa, synthetic construct
  SITE 1: note = N-term Acetic Acid
  SITE 2: note = (S)-2-amino-2-methylhept-6-enoic acid, useful for stapling/stapled with another amino acid residue comprising an olefin group to form a staple through the olefin group
  SITE 5: note = (S)-2-amino-3,3-diphenylpropanoic acid
  VARIANT 6: note = 2-amino-2-(pent-4-en-1-yl)hept-6-enoic acid, useful for stapling/stapled with another amino acid residue comprising an olefin group to form a staple through one of the two olefin groups and/or with another amino acid residue comprising an olefin group to form a staple through the other of the two olefin groups
  SITE 8: note = (S)-3-(2-amino-2-carboxyethyl)benzoic acid
  SITE 9: note = 2-amino-2-methylpropanoic acid
  SITE 12: note = L-lysine, useful for stapling/stapled with another amino acid residue comprising a side chain acid group to form a staple through the 6-amino group
  SITE 13: note (S)-3-amino-1-((but-3-en-1-yloxy)carbonyl)pyrrolidine-3-car boxylic acid, useful for stapling/stapled with another amino acid residue comprising an olefin group to form a staple through the olefin group
  SITE 15: note = (S)-2-amino-3-(3,4-dichlorophenyl)propanoic acid
  SITE 16: note = L-glutamic acid, useful for stapling/stapled with another amino acid residue comprising a side chain amino group to form a staple through the 4-carboxyl group
  SITE 16: note = C-term amino
PXEDXXDXXAFKXFXE

SEQ ID NO: 1449 - protein, 16 aa, synthetic construct
  SITE 1: note = N-term Acetic Acid
  SITE 2: note = (S)-2-amino-2-methylhept-6-enoic acid, useful for stapling/stapled with another amino acid residue comprising an olefin group to form a staple through the olefin group
  VARIANT 6: note = 2-amino-2-(pent-4-en-1-yl)hept-6-enoic acid, useful for stapling/stapled with another amino acid residue comprising an olefin group to form a staple through one of the two olefin groups and/or with another amino acid residue comprising an olefin group to form a staple through the other of the two olefin groups
  SITE 8: note = (S)-3-(2-amino-2-carboxyethyl)benzoic acid
  SITE 9: note = 2-amino-2-methylpropanoic acid
  SITE 12: note = L-lysine, useful for stapling/stapled with another amino acid residue comprising a side chain acid group to form a staple through the 6-amino group
  SITE 13: note (S)-3-amino-1-((but-3-en-1-yloxy)carbonyl)pyrrolidine-3-car boxylic acid, useful for stapling/stapled with another amino acid residue comprising an olefin group to form a staple through the olefin group
  SITE 15: note = (S)-2-amino-3-(3,4-dichlorophenyl)propanoic acid
  SITE 16: note = L-glutamic acid, useful for stapling/stapled with another amino acid residue comprising a side chain amino group to form a staple through the 4-carboxyl group
  SITE 16: note = C-term amino
PXEDVXDXXAFKXFXE

SEQ ID NO: 1450 - protein, 16 aa, synthetic construct
  SITE 1: note = N-term Acetic Acid
  SITE 2: note = (S)-2-amino-2-methylhept-6-enoic acid, useful for stapling/stapled with another amino acid residue comprising an olefin group to form a staple through the olefin group
  VARIANT 6: note = 2-amino-2-(pent-4-en-1-yl)hept-6-enoic acid, useful for stapling/stapled with another amino acid residue comprising an olefin group to form a staple through one of the two olefin groups and/or with another amino acid residue comprising an olefin group to form a staple through the other of the two olefin groups
  SITE 8: note = (S)-3-(2-amino-2-carboxyethyl)benzoic acid
  SITE 9: note = 2-amino-2-methylpropanoic acid
  SITE 12: note = L-lysine, useful for stapling/stapled with another amino acid residue comprising a side chain acid group to form a staple through the 6-amino group
  SITE 13: note (S)-3-amino-1-((but-3-en-1-yloxy)carbonyl)pyrrolidine-3-car boxylic acid, useful for stapling/stapled with another amino acid residue comprising an olefin group to form a staple through the olefin group
  SITE 15: note = (S)-2-amino-3-(3,4-dichlorophenyl)propanoic acid
  SITE 16: note = L-glutamic acid, useful for stapling/stapled with another amino acid residue comprising a side chain amino group to form a staple through the 4-carboxyl group
  SITE 16: note = C-term amino
PXEDLXDXXAFKXFXE

SEQ ID NO: 1451 - protein, 16 aa, synthetic construct
  SITE 1: note = N-term Acetic Acid
  SITE 2: note = (S)-2-amino-2-methylhept-6-enoic acid, useful for stapling/stapled with another amino acid residue comprising an olefin group to form a staple through the olefin group
  SITE 5: note = (S)-2-amino-3,3-diphenylpropanoic acid
  VARIANT 6: note = 2-amino-2-(pent-4-en-1-yl)hept-6-enoic acid, useful for stapling/stapled with another amino acid residue comprising an olefin group to form a staple through one of the two olefin groups and/or with another amino acid residue comprising an olefin group to form a staple through the other of the two olefin groups
  SITE 8: note = (S)-3-(2-amino-2-carboxyethyl)benzoic acid
  SITE 9: note = 2-amino-2-methylpropanoic acid
  SITE 12: note = L-lysine, useful for stapling/stapled with another amino acid residue comprising a side chain acid group to form a staple through the 6-amino group
  SITE 13: note (S)-3-amino-1-((but-3-en-1-yloxy)carbonyl)pyrrolidine-3-car boxylic acid, useful for stapling/stapled with another amino acid residue comprising an olefin group to form a staple through the olefin group
  SITE 15: note = (S)-2-amino-3-(3,4-dichlorophenyl)propanoic acid
  SITE 16: note = L-glutamic acid, useful for stapling/stapled with another amino acid residue comprising a side chain amino group to form a staple through the 4-carboxyl group
  SITE 16: note = C-term amino
PXADXXDXXAFKXFXE

SEQ ID NO: 1452 - protein, 16 aa, synthetic construct
  SITE 1: note = N-term Acetic Acid
  SITE 2: note = (S)-2-amino-2-methylhept-6-enoic acid, useful for stapling/stapled with another amino acid residue comprising an olefin group to form a staple through the olefin group
  VARIANT 6: note = 2-amino-2-(pent-4-en-1-yl)hept-6-enoic acid, useful for stapling/stapled with another amino acid residue comprising an olefin group to form a staple through one of the two olefin groups and/or with another amino acid residue comprising an olefin group to form a staple through the other of the two olefin groups
  SITE 8: note = (S)-3-(2-amino-2-carboxyethyl)benzoic acid
  SITE 9: note = 2-amino-2-methylpropanoic acid
  SITE 12: note = L-lysine, useful for stapling/stapled with another amino acid residue comprising a side chain acid group to form a staple through the 6-amino group
  SITE 13: note (S)-3-amino-1-((but-3-en-1-yloxy)carbonyl)pyrrolidine-3-car boxylic acid, useful for stapling/stapled with another amino acid residue comprising an olefin group to form a staple through the olefin group
  SITE 15: note = (S)-2-amino-3-(3,4-dichlorophenyl)propanoic acid
  SITE 16: note = L-glutamic acid, useful for stapling/stapled with another amino acid residue comprising a side chain amino group to form a staple through the 4-carboxyl group
  SITE 16: note = C-term amino
PXADVXDXXAFKXFXE

SEQ ID NO: 1453 - protein, 16 aa, synthetic construct
  SITE 1: note = N-term Acetic Acid
  SITE 2: note = (S)-2-amino-2-methylhept-6-enoic acid, useful for stapling/stapled with another amino acid residue comprising an olefin group to form a staple through the olefin group
  SITE 5: note = (S)-2-amino-3,3-diphenylpropanoic acid
  VARIANT 6: note = 2-amino-2-(pent-4-en-1-yl)hept-6-enoic acid, useful for stapling/stapled with another amino acid residue comprising an olefin group to form a staple through one of the two olefin groups and/or with another amino acid residue comprising an olefin group to form a staple through the other of the two olefin groups
  SITE 8: note = (S)-3-(2-amino-2-carboxyethyl)benzoic acid
  SITE 9: note = 2-amino-2-methylpropanoic acid
  SITE 12: note = L-lysine, useful for stapling/stapled with another amino acid residue comprising a side chain acid group to form a staple through the 6-amino group
  SITE 13: note (S)-3-amino-1-((but-3-en-1-yloxy)carbonyl)pyrrolidine-3-car boxylic acid, useful for stapling/stapled with another amino acid residue comprising an olefin group to form a staple through the olefin group
  SITE 15: note = (S)-2-amino-3-(3,4-dichlorophenyl)propanoic acid
  SITE 16: note = L-glutamic acid, useful for stapling/stapled with another amino acid residue comprising a side chain amino group to form a staple through the 4-carboxyl group
  SITE 16: note = C-term amino
PXVDXXDXXAFKXFXE

SEQ ID NO: 1454 - protein, 16 aa, synthetic construct
  SITE 1: note = N-term Acetic Acid
  SITE 2: note = (S)-2-amino-2-methylhept-6-enoic acid, useful for stapling/stapled with another amino acid residue comprising an olefin group to form a staple through the olefin group
  VARIANT 6: note = 2-amino-2-(pent-4-en-1-yl)hept-6-enoic acid, useful for stapling/stapled with another amino acid residue comprising an olefin group to form a staple through one of the two olefin groups and/or with another amino acid residue comprising an olefin group to form a staple through the other of the two olefin groups
  SITE 8: note = (S)-3-(2-amino-2-carboxyethyl)benzoic acid
  SITE 9: note = 2-amino-2-methylpropanoic acid
  SITE 12: note = L-lysine, useful for stapling/stapled with another amino acid residue comprising a side chain acid group to form a staple through the 6-amino group
  SITE 13: note (S)-3-amino-1-((but-3-en-1-yloxy)carbonyl)pyrrolidine-3-car boxylic acid, useful for stapling/stapled with another amino acid residue comprising an olefin group to form a staple through the olefin group
  SITE 15: note = (S)-2-amino-3-(3,4-dichlorophenyl)propanoic acid
  SITE 16: note = L-glutamic acid, useful for stapling/stapled with another amino acid residue comprising a side chain amino group to form a staple through the 4-carboxyl group
  SITE 16: note = C-term amino
PXVDVXDXXAFKXFXE

SEQ ID NO: 1455 - protein, 16 aa, synthetic construct
  SITE 1: note = N-term Acetic Acid
  SITE 2: note = (S)-2-amino-2-methylhept-6-enoic acid, useful for stapling/stapled with another amino acid residue comprising an olefin group to form a staple through the olefin group
  VARIANT 6: note = 2-amino-2-(pent-4-en-1-yl)hept-6-enoic acid, useful for stapling/stapled with another amino acid residue comprising an olefin group to form a staple through one of the two olefin groups and/or with another amino acid residue comprising an olefin group to form a staple through the other of the two olefin groups
  SITE 8: note = (S)-3-(2-amino-2-carboxyethyl)benzoic acid
  SITE 9: note = 2-amino-2-methylpropanoic acid
  SITE 12: note = L-lysine, useful for stapling/stapled with another amino acid residue comprising a side chain acid group to form a staple through the 6-amino group
  SITE 13: note (S)-3-amino-1-((but-3-en-1-yloxy)carbonyl)pyrrolidine-3-car boxylic acid, useful for stapling/stapled with another amino acid residue comprising an olefin group to form a staple through the olefin group
  SITE 15: note = (S)-2-amino-3-(3,4-dichlorophenyl)propanoic acid
  SITE 16: note = L-glutamic acid, useful for stapling/stapled with another amino acid residue comprising a side chain amino group to form a staple through the 4-carboxyl group
  SITE 16: note = C-term amino
PXVDLXDXXAFKXFXE

SEQ ID NO: 1456 - protein, 16 aa, synthetic construct
  SITE 1: note = N-term Acetic Acid
  SITE 2: note = (S)-2-amino-2-methylhept-6-enoic acid, useful for stapling/stapled with another amino acid residue comprising an olefin group to form a staple through the olefin group
  SITE 5: note = (S)-2-amino-3,3-diphenylpropanoic acid
  VARIANT 6: note = 2-amino-2-(pent-4-en-1-yl)hept-6-enoic acid, useful for stapling/stapled with another amino acid residue comprising an olefin group to form a staple through one of the two olefin groups and/or with another amino acid residue comprising an olefin group to form a staple through the other of the two olefin groups
  SITE 8: note = (S)-3-(2-amino-2-carboxyethyl)benzoic acid
  SITE 9: note = 2-amino-2-methylpropanoic acid
  SITE 12: note = L-lysine, useful for stapling/stapled with another amino acid residue comprising a side chain acid group to form a staple through the 6-amino group
  SITE 13: note (S)-3-amino-1-((but-3-en-1-yloxy)carbonyl)pyrrolidine-3-car boxylic acid, useful for stapling/stapled with another amino acid residue comprising an olefin group to form a staple through the olefin group
  SITE 15: note = (S)-2-amino-3-(3,4-dichlorophenyl)propanoic acid
  SITE 16: note = L-glutamic acid, useful for stapling/stapled with another amino acid residue comprising a side chain amino group to form a staple through the 4-carboxyl group
  SITE 16: note = C-term amino
PXLDXXDXXAFKXFXE

SEQ ID NO: 1457 - protein, 16 aa, synthetic construct
  SITE 1: note = N-term Acetic Acid
  SITE 2: note = (S)-2-amino-2-methylhept-6-enoic acid, useful for stapling/stapled with another amino acid residue comprising an olefin group to form a staple through the olefin group
  VARIANT 6: note = 2-amino-2-(pent-4-en-1-yl)hept-6-enoic acid, useful for stapling/stapled with another amino acid residue comprising an olefin group to form a staple through one of the two olefin groups and/or with another amino acid residue comprising an olefin group to form a staple through the other of the two olefin groups
  SITE 8: note = (S)-3-(2-amino-2-carboxyethyl)benzoic acid
  SITE 9: note = 2-amino-2-methylpropanoic acid
  SITE 12: note = L-lysine, useful for stapling/stapled with another amino acid residue comprising a side chain acid group to form a staple through the 6-amino group
  SITE 13: note (S)-3-amino-1-((but-3-en-1-yloxy)carbonyl)pyrrolidine-3-car boxylic acid, useful for stapling/stapled with another amino acid residue comprising an olefin group to form a staple through the olefin group
  SITE 15: note = (S)-2-amino-3-(3,4-dichlorophenyl)propanoic acid
  SITE 16: note = L-glutamic acid, useful for stapling/stapled with another amino acid residue comprising a side chain amino group to form a staple through the 4-carboxyl group
  SITE 16: note = C-term amino
PXLDVXDXXAFKXFXE

SEQ ID NO: 1458 - protein, 16 aa, synthetic construct
  SITE 1: note = N-term Acetic Acid
  SITE 2: note = (S)-2-amino-2-methylhept-6-enoic acid, useful for stapling/stapled with another amino acid residue comprising an olefin group to form a staple through the olefin group
  VARIANT 6: note = 2-amino-2-(pent-4-en-1-yl)hept-6-enoic acid, useful for stapling/stapled with another amino acid residue comprising an olefin group to form a staple through one of the two olefin groups and/or with another amino acid residue comprising an olefin group to form a staple through the other of the two olefin groups
  SITE 8: note = (S)-3-(2-amino-2-carboxyethyl)benzoic acid
  SITE 9: note = 2-amino-2-methylpropanoic acid
  SITE 12: note = L-lysine, useful for stapling/stapled with another amino acid residue comprising a side chain acid group to form a staple through the 6-amino group
  SITE 13: note (S)-3-amino-1-((but-3-en-1-yloxy)carbonyl)pyrrolidine-3-car boxylic acid, useful for stapling/stapled with another amino acid residue comprising an olefin group to form a staple through the olefin group
  SITE 15: note = (S)-2-amino-3-(3,4-dichlorophenyl)propanoic acid
  SITE 16: note = L-glutamic acid, useful for stapling/stapled with another amino acid residue comprising a side chain amino group to form a staple through the 4-carboxyl group
  SITE 16: note = C-term amino
PXLDLXDXXAFKXFXE

SEQ ID NO: 1459 - protein, 14 aa, synthetic construct
  SITE 1: note = N-term Acetic Acid
  SITE 1: note = (R)-2-allylpyrrolidine-2-carboxylic acid, useful for stapling/stapled with another amino acid residue comprising an olefin group to form a staple through the olefin group
  VARIANT 4: note = 2-amino-2-(pent-4-en-1-yl)hept-6-enoic acid, useful for stapling/stapled with another amino acid residue comprising an olefin group to form a staple through one of the two olefin groups and/or with another amino acid residue comprising an olefin group to form a staple through the other of the two olefin groups
  SITE 6: note = (S)-3-(2-amino-2-carboxyethyl)benzoic acid
  SITE 7: note = N5-((1s,4R)-4-(aminomethyl)cyclohexyl)-L-glutamine, useful for stapling/stapled with another amino acid residue comprising a side chain acid group to form a staple through the amino group in the side chain
  SITE 11: note (S)-3-amino-1-((pent-4-en-1-yloxy)carbonyl)pyrrolidine-3-ca rboxylic acid, useful for stapling/stapled with another amino acid residue comprising an olefin group to form a staple through the olefin group
  SITE 13: note = (S)-2-amino-3-(3,4-dichlorophenyl)propanoic acid
  SITE 14: note = L-glutamic acid, useful for stapling/stapled with another amino acid residue comprising a side chain amino group to form a staple through the 4-carboxyl group
  SITE 14: note = C-term amino
XDLXDXXAFLXFXE

SEQ ID NO: 1460 - protein, 14 aa, synthetic construct
  SITE 1: note = N-term Acetic Acid
  SITE 1: note = (R)-2-allylpyrrolidine-2-carboxylic acid, useful for stapling/stapled with another amino acid residue comprising an olefin group to form a staple through the olefin group
  VARIANT 4: note = 2-amino-2-(pent-4-en-1-yl)hept-6-enoic acid, useful for stapling/stapled with another amino acid residue comprising an olefin group to form a staple through one of the two olefin groups and/or with another amino acid residue comprising an olefin group to form a staple through the other of the two olefin groups
  SITE 6: note = (S)-3-(2-amino-2-carboxyethyl)benzoic acid
  SITE 7: note = N5-((1s,4R)-4-(aminomethyl)cyclohexyl)-L-glutamine, useful for stapling/stapled with another amino acid residue comprising a side chain acid group to form a staple through the amino group in the side chain
  SITE 11: note (S)-3-amino-1-((pent-4-en-1-yloxy)carbonyl)pyrrolidine-3-ca rboxylic acid, useful for stapling/stapled with another amino acid residue comprising an olefin group to form a staple through the olefin group
  SITE 13: note = (S)-2-amino-3-(3,4-dichlorophenyl)propanoic acid
  SITE 14: note = L-glutamic acid, useful for stapling/stapled with another amino acid residue comprising a side chain amino group to form a staple through the 4-carboxyl group
  SITE 14: note = C-term amino
XDLXDXXAFAXFXE

SEQ ID NO: 1461 - protein, 14 aa, synthetic construct
  SITE 1: note = N-term Acetic Acid
  SITE 1: note = (R)-2-allylpyrrolidine-2-carboxylic acid, useful for stapling/stapled with another amino acid residue comprising an olefin group to form a staple through the olefin group
  VARIANT 4: note = 2-amino-2-(pent-4-en-1-yl)hept-6-enoic acid, useful for stapling/stapled with another amino acid residue comprising an olefin group to form a staple through one of the two olefin groups and/or with another amino acid residue comprising an olefin group to form a staple through the other of the two olefin groups
  SITE 6: note = (S)-3-(2-amino-2-carboxyethyl)benzoic acid
  SITE 7: note = L-glutamic acid, useful for stapling/stapled with another amino acid residue comprising a side chain amino group to form a staple through the 4-carboxyl group
  SITE 11: note (S)-3-amino-1-((pent-4-en-1-yloxy)carbonyl)pyrrolidine-3-ca rboxylic acid, useful for stapling/stapled with another amino acid residue comprising an olefin group to form a staple through the olefin group
  SITE 13: note = (S)-2-amino-3-(3,4-dichlorophenyl)propanoic acid
  SITE 14: note = N5-((1s,4R)-4-(aminomethyl)cyclohexyl)-L-glutamine, useful for stapling/stapled with another amino acid residue comprising a side chain acid group to form a staple through the amino group in the side chain
  SITE 14: note = C-term amino
XDLXDXEAFLXFXX

SEQ ID NO: 1462 - protein, 14 aa, synthetic construct
  SITE 1: note = N-term Acetic Acid
  SITE 1: note = (R)-2-allylpyrrolidine-2-carboxylic acid, useful for stapling/stapled with another amino acid residue comprising an olefin group to form a staple through the olefin group
  VARIANT 4: note = 2-amino-2-(pent-4-en-1-yl)hept-6-enoic acid, useful for stapling/stapled with another amino acid residue comprising an olefin group to form a staple through one of the two olefin groups and/or with another amino acid residue comprising an olefin group to form a staple through the other of the two olefin groups
  SITE 6: note = (S)-3-(2-amino-2-carboxyethyl)benzoic acid
  SITE 7: note = L-glutamic acid, useful for stapling/stapled with another amino acid residue comprising a side chain amino group to form a staple through the 4-carboxyl group
  SITE 11: note (S)-3-amino-1-((pent-4-en-1-yloxy)carbonyl)pyrrolidine-3-ca rboxylic acid, useful for stapling/stapled with another amino acid residue comprising an olefin group to form a staple through the olefin group
  SITE 13: note = (S)-2-amino-3-(3,4-dichlorophenyl)propanoic acid
  SITE 14: note = N5-((1s,4R)-4-(aminomethyl)cyclohexyl)-L-glutamine, useful for stapling/stapled with another amino acid residue comprising a side chain acid group to form a staple through the amino group in the side chain
  SITE 14: note = C-term amino
XDLXDXEAFAXFXX

SEQ ID NO: 1463 - protein, 14 aa, synthetic construct
  SITE 1: note = N-term Acetic Acid
  SITE 1: note = (R)-2-allylpyrrolidine-2-carboxylic acid, useful for stapling/stapled with another amino acid residue comprising an olefin group to form a staple through the olefin group
  VARIANT 4: note = 2-amino-2-(pent-4-en-1-yl)hept-6-enoic acid, useful for stapling/stapled with another amino acid residue comprising an olefin group to form a staple through one of the two olefin groups and/or with another amino acid residue comprising an olefin group to form a staple through the other of the two olefin groups
  SITE 6: note = (S)-3-(2-amino-2-carboxyethyl)benzoic acid
  SITE 7: note (S)-2-amino-5-(2-amino-7-azaspiro[3.5]nonan-7-yl)-5-oxopent anoic acid, useful for stapling/stapled with another amino acid residue comprising a side chain acid group to form a staple through the amino group in the side chain
  SITE 11: note (S)-3-amino-1-((pent-4-en-1-yloxy)carbonyl)pyrrolidine-3-ca rboxylic acid, useful for stapling/stapled with another amino acid residue comprising an olefin group to form a staple through the olefin group
  SITE 13: note = (S)-2-amino-3-(3,4-dichlorophenyl)propanoic acid
  SITE 14: note = L-glutamic acid, useful for stapling/stapled with another amino acid residue comprising a side chain amino group to form a staple through the 4-carboxyl group
  SITE 14: note = C-term amino
XDLXDXXAFAXFXE

SEQ ID NO: 1464 - protein, 14 aa, synthetic construct
  SITE 1: note = N-term Acetic Acid
  SITE 1: note = (R)-2-allylpyrrolidine-2-carboxylic acid, useful for stapling/stapled with another amino acid residue comprising an olefin group to form a staple through the olefin group
  VARIANT 4: note = 2-amino-2-(pent-4-en-1-yl)hept-6-enoic acid, useful for stapling/stapled with another amino acid residue comprising an olefin group to form a staple through one of the two olefin groups and/or with another amino acid residue comprising an olefin group to form a staple through the other of the two olefin groups
  SITE 6: note = (S)-3-(2-amino-2-carboxyethyl)benzoic acid
  SITE 7: note = L-glutamic acid, useful for stapling/stapled with another amino acid residue comprising a side chain amino group to form a staple through the 4-carboxyl group
  SITE 11: note (S)-3-amino-1-((pent-4-en-1-yloxy)carbonyl)pyrrolidine-3-ca rboxylic acid, useful for stapling/stapled with another amino acid residue comprising an olefin group to form a staple through the olefin group
  SITE 13: note = (S)-2-amino-3-(3,4-dichlorophenyl)propanoic acid
  SITE 14: note (S)-2-amino-5-(2-amino-7-azaspiro[3.5]nonan-7-yl)-5-oxopent anoic acid, useful for stapling/stapled with another amino acid residue comprising a side chain acid group to form a staple through the amino group in the side chain
  SITE 14: note = C-term amino
XDLXDXEAFLXFXX

SEQ ID NO: 1465 - protein, 14 aa, synthetic construct
  SITE 1: note = N-term Acetic Acid
  SITE 1: note = (R)-2-allylpyrrolidine-2-carboxylic acid, useful for stapling/stapled with another amino acid residue comprising an olefin group to form a staple through the olefin group
  VARIANT 4: note = 2-amino-2-(pent-4-en-1-yl)hept-6-enoic acid, useful for stapling/stapled with another amino acid residue comprising an olefin group to form a staple through one of the two olefin groups and/or with another amino acid residue comprising an olefin group to form a staple through the other of the two olefin groups
  SITE 6: note = (S)-3-(2-amino-2-carboxyethyl)benzoic acid
  SITE 7: note = L-glutamic acid, useful for stapling/stapled with another amino acid residue comprising a side chain amino group to form a staple through the 4-carboxyl group
  SITE 11: note (S)-3-amino-1-((pent-4-en-1-yloxy)carbonyl)pyrrolidine-3-ca rboxylic acid, useful for stapling/stapled with another amino acid residue comprising an olefin group to form a staple through the olefin group
  SITE 13: note = (S)-2-amino-3-(3,4-dichlorophenyl)propanoic acid
  SITE 14: note (S)-2-amino-5-(2-amino-7-azaspiro[3.5]nonan-7-yl)-5-oxopent anoic acid, useful for stapling/stapled with another amino acid residue comprising a side chain acid group to form a staple through the amino group in the side chain
  SITE 14: note = C-term amino
XDLXDXEAFAXFXX

SEQ ID NO: 1466 - protein, 14 aa, synthetic construct
  SITE 1: note = N-term Acetic Acid
  SITE 1: note = (R)-2-allylpyrrolidine-2-carboxylic acid, useful for stapling/stapled with another amino acid residue comprising an olefin group to form a staple through the olefin group
  VARIANT 4: note = 2-amino-2-(pent-4-en-1-yl)hept-6-enoic acid, useful for stapling/stapled with another amino acid residue comprising an olefin group to form a staple through one of the two olefin groups and/or with another amino acid residue comprising an olefin group to form a staple through the other of the two olefin groups
  SITE 6: note = (S)-3-(2-amino-2-carboxyethyl)benzoic acid
  SITE 7: note (S)-2-amino-5-(4-(azetidin-3-yl)piperidin-1-yl)-5-oxopentan oic acid, useful for stapling/stapled with another amino acid residue comprising a side chain acid group to form a staple through the amino group in the side chain
  SITE 11: note (S)-3-amino-1-((pent-4-en-1-yloxy)carbonyl)pyrrolidine-3-ca rboxylic acid, useful for stapling/stapled with another amino acid residue comprising an olefin group to form a staple through the olefin group
  SITE 13: note = (S)-2-amino-3-(3,4-dichlorophenyl)propanoic acid
  SITE 14: note = L-glutamic acid, useful for stapling/stapled with another amino acid residue comprising a side chain amino group to form a staple through the 4-carboxyl group
  SITE 14: note = C-term amino
XDLXDXXAFLXFXE

SEQ ID NO: 1467 - protein, 14 aa, synthetic construct
  SITE 1: note = N-term Acetic Acid
  SITE 1: note = (R)-2-allylpyrrolidine-2-carboxylic acid, useful for stapling/stapled with another amino acid residue comprising an olefin group to form a staple through the olefin group
  VARIANT 4: note = 2-amino-2-(pent-4-en-1-yl)hept-6-enoic acid, useful for stapling/stapled with another amino acid residue comprising an olefin group to form a staple through one of the two olefin groups and/or with another amino acid residue comprising an olefin group to form a staple through the other of the two olefin groups
  SITE 6: note = (S)-3-(2-amino-2-carboxyethyl)benzoic acid
  SITE 7: note (S)-2-amino-5-(4-(azetidin-3-yl)piperidin-1-yl)-5-oxopentan oic acid, useful for stapling/stapled with another amino acid residue comprising a side chain acid group to form a staple through the amino group in the side chain
  SITE 11: note (S)-3-amino-1-((pent-4-en-1-yloxy)carbonyl)pyrrolidine-3-ca rboxylic acid, useful for stapling/stapled with another amino acid residue comprising an olefin group to form a staple through the olefin group
  SITE 13: note = (S)-2-amino-3-(3,4-dichlorophenyl)propanoic acid
  SITE 14: note = L-glutamic acid, useful for stapling/stapled with another amino acid residue comprising a side chain amino group to form a staple through the 4-carboxyl group
  SITE 14: note = C-term amino
XDLXDXXAFAXFXE

SEQ ID NO: 1468 - protein, 14 aa, synthetic construct
  SITE 1: note = N-term Acetic Acid
  SITE 1: note = (R)-2-allylpyrrolidine-2-carboxylic acid, useful for stapling/stapled with another amino acid residue comprising an olefin group to form a staple through the olefin group
  VARIANT 4: note = 2-amino-2-(pent-4-en-1-yl)hept-6-enoic acid, useful for stapling/stapled with another amino acid residue comprising an olefin group to form a staple through one of the two olefin groups and/or with another amino acid residue comprising an olefin group to form a staple through the other of the two olefin groups
  SITE 6: note = (S)-3-(2-amino-2-carboxyethyl)benzoic acid
  SITE 7: note = L-glutamic acid, useful for stapling/stapled with another amino acid residue comprising a side chain amino group to form a staple through the 4-carboxyl group
  SITE 11: note (S)-3-amino-1-((pent-4-en-1-yloxy)carbonyl)pyrrolidine-3-ca rboxylic acid, useful for stapling/stapled with another amino acid residue comprising an olefin group to form a staple through the olefin group
  SITE 13: note = (S)-2-amino-3-(3,4-dichlorophenyl)propanoic acid
  SITE 14: note (S)-2-amino-5-(4-(azetidin-3-yl)piperidin-1-yl)-5-oxopentan oic acid, useful for stapling/stapled with another amino acid residue comprising a side chain acid group to form a staple through the amino group in the side chain
  SITE 14: note = C-term amino
XDLXDXEAFLXFXX

SEQ ID NO: 1469 - protein, 14 aa, synthetic construct
  SITE 1: note = N-term Acetic Acid
  SITE 1: note = (R)-2-allylpyrrolidine-2-carboxylic acid, useful for stapling/stapled with another amino acid residue comprising an olefin group to form a staple through the olefin group
  VARIANT 4: note = 2-amino-2-(pent-4-en-1-yl)hept-6-enoic acid, useful for stapling/stapled with another amino acid residue comprising an olefin group to form a staple through one of the two olefin groups and/or with another amino acid residue comprising an olefin group to form a staple through the other of the two olefin groups
  SITE 6: note = (S)-3-(2-amino-2-carboxyethyl)benzoic acid
  SITE 7: note = L-glutamic acid, useful for stapling/stapled with another amino acid residue comprising a side chain amino group to form a staple through the 4-carboxyl group
  SITE 11: note (S)-3-amino-1-((pent-4-en-1-yloxy)carbonyl)pyrrolidine-3-ca rboxylic acid, useful for stapling/stapled with another amino acid residue comprising an olefin group to form a staple through the olefin group
  SITE 13: note = (S)-2-amino-3-(3,4-dichlorophenyl)propanoic acid
  SITE 14: note (S)-2-amino-5-(4-(azetidin-3-yl)piperidin-1-yl)-5-oxopentan oic acid, useful for stapling/stapled with another amino acid residue comprising a side chain acid group to form a staple through the amino group in the side chain
  SITE 14: note = C-term amino
XDLXDXEAFAXFXX

SEQ ID NO: 1470 - protein, 15 aa, synthetic construct
  SITE 1: note = N-term Acetic Acid
  SITE 1: note = (R)-2-allylpyrrolidine-2-carboxylic acid, useful for stapling/stapled with another amino acid residue comprising an olefin group to form a staple through the olefin group
  VARIANT 4: note = 2-amino-2-(pent-4-en-1-yl)hept-6-enoic acid, useful for stapling/stapled with another amino acid residue comprising an olefin group to form a staple through one of the two olefin groups and/or with another amino acid residue comprising an olefin group to form a staple through the other of the two olefin groups
  SITE 6: note = (S)-3-(2-amino-2-carboxyethyl)benzoic acid
  SITE 7: note = 2-amino-2-methylpropanoic acid
  SITE 10: note = L-lysine, useful for stapling/stapled with another amino acid residue comprising a side chain acid group to form a staple through the 6-amino group
  SITE 11: note (S)-3-amino-1-((pent-4-en-1-yloxy)carbonyl)pyrrolidine-3-ca rboxylic acid, useful for stapling/stapled with another amino acid residue comprising an olefin group to form a staple through the olefin group
  SITE 13: note = (S)-2-amino-3-(3,4-dichlorophenyl)propanoic acid
  SITE 14: note = L-glutamic acid, useful for stapling/stapled with another amino acid residue comprising a side chain amino group to form a staple through the 4-carboxyl group
  SITE 15: note = C-term amino
XDLXDXXAFKXFXEA

SEQ ID NO: 1471 - protein, 15 aa, synthetic construct
  SITE 1: note = N-term Acetic Acid
  SITE 1: note = (R)-2-allylpyrrolidine-2-carboxylic acid, useful for stapling/stapled with another amino acid residue comprising an olefin group to form a staple through the olefin group
  VARIANT 4: note = 2-amino-2-(pent-4-en-1-yl)hept-6-enoic acid, useful for stapling/stapled with another amino acid residue comprising an olefin group to form a staple through one of the two olefin groups and/or with another amino acid residue comprising an olefin group to form a staple through the other of the two olefin groups
  SITE 6: note = (S)-3-(2-amino-2-carboxyethyl)benzoic acid
  SITE 7: note = 2-amino-2-methylpropanoic acid
  SITE 10: note = L-lysine, useful for stapling/stapled with another amino acid residue comprising a side chain acid group to form a staple through the 6-amino group
  SITE 11: note (S)-3-amino-1-((pent-4-en-1-yloxy)carbonyl)pyrrolidine-3-ca rboxylic acid, useful for stapling/stapled with another amino acid residue comprising an olefin group to form a staple through the olefin group
  SITE 13: note = (S)-2-amino-3-(3,4-dichlorophenyl)propanoic acid
  SITE 14: note = L-glutamic acid, useful for stapling/stapled with another amino acid residue comprising a side chain amino group to form a staple through the 4-carboxyl group
  SITE 15: note = C-term amino
XDLXDXXAFKXWXEA

SEQ ID NO: 1472 - protein, 15 aa, synthetic construct
  SITE 1: note = N-term Acetic Acid
  SITE 1: note = (R)-2-allylpyrrolidine-2-carboxylic acid, useful for stapling/stapled with another amino acid residue comprising an olefin group to form a staple through the olefin group
  VARIANT 4: note = 2-amino-2-(pent-4-en-1-yl)hept-6-enoic acid, useful for stapling/stapled with another amino acid residue comprising an olefin group to form a staple through one of the two olefin groups and/or with another amino acid residue comprising an olefin group to form a staple through the other of the two olefin groups
  SITE 6: note = (S)-3-(2-amino-2-carboxyethyl)benzoic acid
  SITE 7: note = 2-amino-2-methylpropanoic acid
  SITE 10: note = L-lysine, useful for stapling/stapled with another amino acid residue comprising a side chain acid group to form a staple through the 6-amino group
  SITE 11: note (S)-3-amino-1-((pent-4-en-1-yloxy)carbonyl)pyrrolidine-3-ca rboxylic acid, useful for stapling/stapled with another amino acid residue comprising an olefin group to form a staple through the olefin group
  SITE 12: note = (S)-2-amino-3-(benzo[b]thiophen-3-yl)propanoic acid
  SITE 13: note = (S)-2-amino-3-(3,4-dichlorophenyl)propanoic acid
  SITE 14: note = L-glutamic acid, useful for stapling/stapled with another amino acid residue comprising a side chain amino group to form a staple through the 4-carboxyl group
  SITE 15: note = C-term amino
XDLXDXXAFKXXXEA

SEQ ID NO: 1473 - protein, 15 aa, synthetic construct
  SITE 1: note = N-term Acetic Acid
  SITE 1: note = (R)-2-allylpyrrolidine-2-carboxylic acid, useful for stapling/stapled with another amino acid residue comprising an olefin group to form a staple through the olefin group
  VARIANT 4: note = 2-amino-2-(pent-4-en-1-yl)hept-6-enoic acid, useful for stapling/stapled with another amino acid residue comprising an olefin group to form a staple through one of the two olefin groups and/or with another amino acid residue comprising an olefin group to form a staple through the other of the two olefin groups
  SITE 6: note = (S)-3-(2-amino-2-carboxyethyl)benzoic acid
  SITE 7: note = 2-amino-2-methylpropanoic acid
  SITE 10: note = L-lysine, useful for stapling/stapled with another amino acid residue comprising a side chain acid group to form a staple through the 6-amino group
  SITE 11: note (S)-3-amino-1-((pent-4-en-1-yloxy)carbonyl)pyrrolidine-3-ca rboxylic acid, useful for stapling/stapled with another amino acid residue comprising an olefin group to form a staple through the olefin group
  SITE 12: note = (S)-2-amino-3-(5-chloro-1H-indol-3-yl)propanoic acid
  SITE 13: note = (S)-2-amino-3-(3,4-dichlorophenyl)propanoic acid
  SITE 14: note = L-glutamic acid, useful for stapling/stapled with another amino acid residue comprising a side chain amino group to form a staple through the 4-carboxyl group
  SITE 15: note = C-term amino
XDLXDXXAFKXXXEA

SEQ ID NO: 1474 - protein, 15 aa, synthetic construct
  SITE 1: note = N-term Acetic Acid
  SITE 1: note = (R)-2-allylpyrrolidine-2-carboxylic acid, useful for stapling/stapled with another amino acid residue comprising an olefin group to form a staple through the olefin group
  VARIANT 4: note = 2-amino-2-(pent-4-en-1-yl)hept-6-enoic acid, useful for stapling/stapled with another amino acid residue comprising an olefin group to form a staple through one of the two olefin groups and/or with another amino acid residue comprising an olefin group to form a staple through the other of the two olefin groups
  SITE 6: note = (S)-3-(2-amino-2-carboxyethyl)benzoic acid
  SITE 7: note = 2-amino-2-methylpropanoic acid
  SITE 10: note = L-lysine, useful for stapling/stapled with another amino acid residue comprising a side chain acid group to form a staple through the 6-amino group
  SITE 11: note (S)-3-amino-1-((pent-4-en-1-yloxy)carbonyl)pyrrolidine-3-ca rboxylic acid, useful for stapling/stapled with another amino acid residue comprising an olefin group to form a staple through the olefin group
  SITE 12: note = (S)-2-amino-3-(6-chloro-1H-indol-3-yl)propanoic acid
  SITE 13: note = (S)-2-amino-3-(3,4-dichlorophenyl)propanoic acid
  SITE 14: note = L-glutamic acid, useful for stapling/stapled with another amino acid residue comprising a side chain amino group to form a staple through the 4-carboxyl group
  SITE 15: note = C-term amino
XDLXDXXAFKXXXEA

SEQ ID NO: 1475 - protein, 15 aa, synthetic construct
  SITE 1: note = N-term Acetic Acid
  SITE 1: note = (R)-2-allylpyrrolidine-2-carboxylic acid, useful for stapling/stapled with another amino acid residue comprising an olefin group to form a staple through the olefin group
  VARIANT 4: note = 2-amino-2-(pent-4-en-1-yl)hept-6-enoic acid, useful for stapling/stapled with another amino acid residue comprising an olefin group to form a staple through one of the two olefin groups and/or with another amino acid residue comprising an olefin group to form a staple through the other of the two olefin groups
  SITE 6: note = (S)-3-(2-amino-2-carboxyethyl)benzoic acid
  SITE 7: note = 2-amino-2-methylpropanoic acid
  SITE 10: note = L-lysine, useful for stapling/stapled with another amino acid residue comprising a side chain acid group to form a staple through the 6-amino group
  SITE 11: note (S)-3-amino-1-((pent-4-en-1-yloxy)carbonyl)pyrrolidine-3-ca rboxylic acid, useful for stapling/stapled with another amino acid residue comprising an olefin group to form a staple through the olefin group
  SITE 13: note = (S)-2-amino-3-(benzo[b]thiophen-3-yl)propanoic acid
  SITE 14: note = L-glutamic acid, useful for stapling/stapled with another amino acid residue comprising a side chain amino group to form a staple through the 4-carboxyl group
  SITE 15: note = C-term amino
XDLXDXXAFKXFXEA

SEQ ID NO: 1476 - protein, 15 aa, synthetic construct
  SITE 1: note = N-term Acetic Acid
  SITE 1: note = (R)-2-allylpyrrolidine-2-carboxylic acid, useful for stapling/stapled with another amino acid residue comprising an olefin group to form a staple through the olefin group
  VARIANT 4: note = 2-amino-2-(pent-4-en-1-yl)hept-6-enoic acid, useful for stapling/stapled with another amino acid residue comprising an olefin group to form a staple through one of the two olefin groups and/or with another amino acid residue comprising an olefin group to form a staple through the other of the two olefin groups
  SITE 6: note = (S)-3-(2-amino-2-carboxyethyl)benzoic acid
  SITE 7: note = 2-amino-2-methylpropanoic acid
  SITE 10: note = L-lysine, useful for stapling/stapled with another amino acid residue comprising a side chain acid group to form a staple through the 6-amino group
  SITE 11: note (S)-3-amino-1-((pent-4-en-1-yloxy)carbonyl)pyrrolidine-3-ca rboxylic acid, useful for stapling/stapled with another amino acid residue comprising an olefin group to form a staple through the olefin group
  SITE 13: note = (S)-2-amino-3-(benzo[b]thiophen-3-yl)propanoic acid
  SITE 14: note = L-glutamic acid, useful for stapling/stapled with another amino acid residue comprising a side chain amino group to form a staple through the 4-carboxyl group
  SITE 15: note = C-term amino
XDLXDXXAFKXWXEA

SEQ ID NO: 1477 - protein, 15 aa, synthetic construct
  SITE 1: note = N-term Acetic Acid
  SITE 1: note = (R)-2-allylpyrrolidine-2-carboxylic acid, useful for stapling/stapled with another amino acid residue comprising an olefin group to form a staple through the olefin group
  VARIANT 4: note = 2-amino-2-(pent-4-en-1-yl)hept-6-enoic acid, useful for stapling/stapled with another amino acid residue comprising an olefin group to form a staple through one of the two olefin groups and/or with another amino acid residue comprising an olefin group to form a staple through the other of the two olefin groups
  SITE 6: note = (S)-3-(2-amino-2-carboxyethyl)benzoic acid
  SITE 7: note = 2-amino-2-methylpropanoic acid
  SITE 10: note = L-lysine, useful for stapling/stapled with another amino acid residue comprising a side chain acid group to form a staple through the 6-amino group
  SITE 11: note (S)-3-amino-1-((pent-4-en-1-yloxy)carbonyl)pyrrolidine-3-ca rboxylic acid, useful for stapling/stapled with another amino acid residue comprising an olefin group to form a staple through the olefin group
  SITE 12: note = (S)-2-amino-3-(benzo[b]thiophen-3-yl)propanoic acid
  SITE 13: note = (S)-2-amino-3-(benzo[b]thiophen-3-yl)propanoic acid
  SITE 14: note = L-glutamic acid, useful for stapling/stapled with another amino acid residue comprising a side chain amino group to form a staple through the 4-carboxyl group
  SITE 15: note = C-term amino
XDLXDXXAFKXXXEA

SEQ ID NO: 1478 - protein, 15 aa, synthetic construct
  SITE 1: note = N-term Acetic Acid
  SITE 1: note = (R)-2-allylpyrrolidine-2-carboxylic acid, useful for stapling/stapled with another amino acid residue comprising an olefin group to form a staple through the olefin group
  VARIANT 4: note = 2-amino-2-(pent-4-en-1-yl)hept-6-enoic acid, useful for stapling/stapled with another amino acid residue comprising an olefin group to form a staple through one of the two olefin groups and/or with another amino acid residue comprising an olefin group to form a staple through the other of the two olefin groups
  SITE 6: note = (S)-3-(2-amino-2-carboxyethyl)benzoic acid
  SITE 7: note = 2-amino-2-methylpropanoic acid
  SITE 10: note = L-lysine, useful for stapling/stapled with another amino acid residue comprising a side chain acid group to form a staple through the 6-amino group
  SITE 11: note (S)-3-amino-1-((pent-4-en-1-yloxy)carbonyl)pyrrolidine-3-ca rboxylic acid, useful for stapling/stapled with another amino acid residue comprising an olefin group to form a staple through the olefin group
  SITE 12: note = (S)-2-amino-3-(5-chloro-1H-indol-3-yl)propanoic acid
  SITE 13: note = (S)-2-amino-3-(benzo[b]thiophen-3-yl)propanoic acid
  SITE 14: note = L-glutamic acid, useful for stapling/stapled with another amino acid residue comprising a side chain amino group to form a staple through the 4-carboxyl group
  SITE 15: note = C-term amino
XDLXDXXAFKXXXEA

SEQ ID NO: 1479 - protein, 15 aa, synthetic construct
  SITE 1: note = N-term Acetic Acid
  SITE 1: note = (R)-2-allylpyrrolidine-2-carboxylic acid, useful for stapling/stapled with another amino acid residue comprising an olefin group to form a staple through the olefin group
  VARIANT 4: note = 2-amino-2-(pent-4-en-1-yl)hept-6-enoic acid, useful for stapling/stapled with another amino acid residue comprising an olefin group to form a staple through one of the two olefin groups and/or with another amino acid residue comprising an olefin group to form a staple through the other of the two olefin groups
  SITE 6: note = (S)-3-(2-amino-2-carboxyethyl)benzoic acid
  SITE 7: note = 2-amino-2-methylpropanoic acid
  SITE 10: note = L-lysine, useful for stapling/stapled with another amino acid residue comprising a side chain acid group to form a staple through the 6-amino group
  SITE 11: note (S)-3-amino-1-((pent-4-en-1-yloxy)carbonyl)pyrrolidine-3-ca rboxylic acid, useful for stapling/stapled with another amino acid residue comprising an olefin group to form a staple through the olefin group
  SITE 12: note = (S)-2-amino-3-(6-chloro-1H-indol-3-yl)propanoic acid
  SITE 13: note = (S)-2-amino-3-(benzo[b]thiophen-3-yl)propanoic acid
  SITE 14: note = L-glutamic acid, useful for stapling/stapled with another amino acid residue comprising a side chain amino group to form a staple through the 4-carboxyl group
  SITE 15: note = C-term amino
XDLXDXXAFKXXXEA

SEQ ID NO: 1480 - protein, 17 aa, synthetic construct
  SITE 1: note = N-term Acetic Acid
  SITE 1: note = (R)-2-allylpyrrolidine-2-carboxylic acid, useful for stapling/stapled with another amino acid residue comprising an olefin group to form a staple through the olefin group
  SITE 3: note = (S)-2-amino-3,3-diphenylpropanoic acid
  VARIANT 4: note = 2-amino-2-(pent-4-en-1-yl)hept-6-enoic acid, useful for stapling/stapled with another amino acid residue comprising an olefin group to form a staple through one of the two olefin groups and/or with another amino acid residue comprising an olefin group to form a staple through the other of the two olefin groups
  SITE 6: note = (S)-3-(2-amino-2-carboxyethyl)benzoic acid
  SITE 10: note = L-lysine, useful for stapling/stapled with another amino acid residue comprising a side chain acid group to form a staple through the 6-amino group
  SITE 11: note (S)-3-amino-1-((pent-4-en-1-yloxy)carbonyl)pyrrolidine-3-ca rboxylic acid, useful for stapling/stapled with another amino acid residue comprising an olefin group to form a staple through the olefin group
  SITE 12: note = (S)-2-amino-3-(thiophen-3-yl)propanoic acid
  SITE 13: note = (S)-2-amino-3-(3,4-dichlorophenyl)propanoic acid
  SITE 14: note = L-glutamic acid, useful for stapling/stapled with another amino acid residue comprising a side chain amino group to form a staple through the 4-carboxyl group
  SITE 17: note (S)-1-((3r,5r,7r)-adamantan-1-yl)-17-amino-1,11-dioxo-5,8-d ioxa -2,12-diazaoctadecan-18-oic acid
  SITE 17: note = C-term amino
XDXXDXAAFKXXXEAAX

SEQ ID NO: 1481 - protein, 17 aa, synthetic construct
  SITE 1: note = N-term Acetic Acid
  SITE 1: note = (R)-2-allylpyrrolidine-2-carboxylic acid, useful for stapling/stapled with another amino acid residue comprising an olefin group to form a staple through the olefin group
  SITE 3: note = (S)-2-amino-3,3-diphenylpropanoic acid
  VARIANT 4: note = 2-amino-2-(pent-4-en-1-yl)hept-6-enoic acid, useful for stapling/stapled with another amino acid residue comprising an olefin group to form a staple through one of the two olefin groups and/or with another amino acid residue comprising an olefin group to form a staple through the other of the two olefin groups
  SITE 6: note = (S)-3-(2-amino-2-carboxyethyl)benzoic acid
  SITE 10: note = L-lysine, useful for stapling/stapled with another amino acid residue comprising a side chain acid group to form a staple through the 6-amino group
  SITE 11: note (S)-3-amino-1-((pent-4-en-1-yloxy)carbonyl)pyrrolidine-3-ca rboxylic acid, useful for stapling/stapled with another amino acid residue comprising an olefin group to form a staple through the olefin group
  SITE 12: note = (S)-2-amino-3-(thiophen-3-yl)propanoic acid
  SITE 13: note = (S)-2-amino-3-(3,4-dichlorophenyl)propanoic acid
  SITE 14: note = L-glutamic acid, useful for stapling/stapled with another amino acid residue comprising a side chain amino group to form a staple through the 4-carboxyl group
  SITE 17: note (S)-1-((3r,5r,7r)-adamantan-1-yl)-35-amino-1,29-dioxo-5,8,1 1,14, 17,20,23,26-octaoxa-2,30-diazahexatriacontan-36-oic acid
  SITE 17: note = C-term amino
XDXXDXAAFKXXXEAAX

SEQ ID NO: 1482 - protein, 17 aa, synthetic construct
  SITE 1: note = N-term Acetic Acid
  SITE 1: note = (R)-2-allylpyrrolidine-2-carboxylic acid, useful for stapling/stapled with another amino acid residue comprising an olefin group to form a staple through the olefin group
  SITE 3: note = (S)-2-amino-3,3-diphenylpropanoic acid
  VARIANT 4: note = 2-amino-2-(pent-4-en-1-yl)hept-6-enoic acid, useful for stapling/stapled with another amino acid residue comprising an olefin group to form a staple through one of the two olefin groups and/or with another amino acid residue comprising an olefin group to form a staple through the other of the two olefin groups
  SITE 6: note = (S)-3-(2-amino-2-carboxyethyl)benzoic acid
  SITE 10: note = L-lysine, useful for stapling/stapled with another amino acid residue comprising a side chain acid group to form a staple through the 6-amino group
  SITE 11: note (S)-3-amino-1-((pent-4-en-1-yloxy)carbonyl)pyrrolidine-3-ca rboxylic acid, useful for stapling/stapled with another amino acid residue comprising an olefin group to form a staple through the olefin group
  SITE 12: note = (S)-2-amino-3-(thiophen-3-yl)propanoic acid
  SITE 13: note = (S)-2-amino-3-(3,4-dichlorophenyl)propanoic acid
  SITE 14: note = L-glutamic acid, useful for stapling/stapled with another amino acid residue comprising a side chain amino group to form a staple through the 4-carboxyl group
  SITE 17: note (2R,21S)-21-amino-2-((3R,5R,8R,9S,10S,13R,14S,17R)-3-hydrox y-10, 13-dimethylhexadecahydro-1H-cyclopenta[a]phenanthren-17-yl) -5, 15-dioxo-9,12-dioxa-6,16-diazadocosan-22-oic acid
  SITE 17: note = C-term amino
XDXXDXAAFKXXXEAAX

SEQ ID NO: 1483 - protein, 17 aa, synthetic construct
  SITE 1: note = N-term Acetic Acid
  SITE 1: note = (R)-2-allylpyrrolidine-2-carboxylic acid, useful for stapling/stapled with another amino acid residue comprising an olefin group to form a staple through the olefin group
  SITE 3: note = (S)-2-amino-3,3-diphenylpropanoic acid
  VARIANT 4: note = 2-amino-2-(pent-4-en-1-yl)hept-6-enoic acid, useful for stapling/stapled with another amino acid residue comprising an olefin group to form a staple through one of the two olefin groups and/or with another amino acid residue comprising an olefin group to form a staple through the other of the two olefin groups
  SITE 6: note = (S)-3-(2-amino-2-carboxyethyl)benzoic acid
  SITE 10: note = L-lysine, useful for stapling/stapled with another amino acid residue comprising a side chain acid group to form a staple through the 6-amino group
  SITE 11: note (S)-3-amino-1-((pent-4-en-1-yloxy)carbonyl)pyrrolidine-3-ca rboxylic acid, useful for stapling/stapled with another amino acid residue comprising an olefin group to form a staple through the olefin group
  SITE 12: note = (S)-2-amino-3-(thiophen-3-yl)propanoic acid
  SITE 13: note = (S)-2-amino-3-(3,4-dichlorophenyl)propanoic acid
  SITE 14: note = L-glutamic acid, useful for stapling/stapled with another amino acid residue comprising a side chain amino group to form a staple through the 4-carboxyl group
  SITE 17: note (2R,39S)-39-amino-2-((3R,5R,8R,9S,10S,13R,14S,17R)-3-hydrox y-10, 13-dimethylhexadecahydro-1H-cyclopenta[a]phenanthren-17-yl) -5, 33-dioxo-9,12,15,18,21,24,27,30-octaoxa-6,34-diazatetracont an -40-oic acid
  SITE 17: note = C-term amino
XDXXDXAAFKXXXEAAX

SEQ ID NO: 1484 - protein, 14 aa, synthetic construct
  SITE 1: note = N-term Acetic Acid
  SITE 1: note = (R)-2-allylpyrrolidine-2-carboxylic acid, useful for stapling/stapled with another amino acid residue comprising an olefin group to form a staple through the olefin group
  VARIANT 4: note = 2-amino-2-(pent-4-en-1-yl)hept-6-enoic acid, useful for stapling/stapled with another amino acid residue comprising an olefin group to form a staple through one of the two olefin groups and/or with another amino acid residue comprising an olefin group to form a staple through the other of the two olefin groups
  SITE 6: note = (S)-3-(2-amino-2-carboxyethyl)benzoic acid
  SITE 7: note (S)-5-([4,4'-bipiperidin]-1-yl)-2-amino-5-oxopentanoic acid, useful for stapling/stapled with another amino acid residue comprising a side chain acid group to form a staple through the amino group in the side chain
  SITE 11: note (S)-3-amino-1-((pent-4-en-1-yloxy)carbonyl)pyrrolidine-3-ca rboxylic acid, useful for stapling/stapled with another amino acid residue comprising an olefin group to form a staple through the olefin group
  SITE 13: note = (S)-2-amino-3-(3,4-dichlorophenyl)propanoic acid
  SITE 14: note = L-glutamic acid, useful for stapling/stapled with another amino acid residue comprising a side chain amino group to form a staple through the 4-carboxyl group
  SITE 14: note = C-term amino
XDLXDXXAFLXFXE

SEQ ID NO: 1485 - protein, 14 aa, synthetic construct
  SITE 1: note = N-term Acetic Acid
  SITE 1: note = (R)-2-allylpyrrolidine-2-carboxylic acid, useful for stapling/stapled with another amino acid residue comprising an olefin group to form a staple through the olefin group
  VARIANT 4: note = 2-amino-2-(pent-4-en-1-yl)hept-6-enoic acid, useful for stapling/stapled with another amino acid residue comprising an olefin group to form a staple through one of the two olefin groups and/or with another amino acid residue comprising an olefin group to form a staple through the other of the two olefin groups
  SITE 6: note = (S)-3-(2-amino-2-carboxyethyl)benzoic acid
  SITE 7: note (S)-5-([4,4'-bipiperidin]-1-yl)-2-amino-5-oxopentanoic acid, useful for stapling/stapled with another amino acid residue comprising a side chain acid group to form a staple through the amino group in the side chain
  SITE 11: note (S)-3-amino-1-((pent-4-en-1-yloxy)carbonyl)pyrrolidine-3-ca rboxylic acid, useful for stapling/stapled with another amino acid residue comprising an olefin group to form a staple through the olefin group
  SITE 13: note = (S)-2-amino-3-(3,4-dichlorophenyl)propanoic acid
  SITE 14: note = L-glutamic acid, useful for stapling/stapled with another amino acid residue comprising a side chain amino group to form a staple through the 4-carboxyl group
  SITE 14: note = C-term amino
XDLXDXXAFAXFXE

SEQ ID NO: 1486 - protein, 14 aa, synthetic construct
  SITE 1: note = N-term Acetic Acid
  SITE 1: note = (R)-2-allylpyrrolidine-2-carboxylic acid, useful for stapling/stapled with another amino acid residue comprising an olefin group to form a staple through the olefin group
  VARIANT 4: note = 2-amino-2-(pent-4-en-1-yl)hept-6-enoic acid, useful for stapling/stapled with another amino acid residue comprising an olefin group to form a staple through one of the two olefin groups and/or with another amino acid residue comprising an olefin group to form a staple through the other of the two olefin groups
  SITE 6: note = (S)-3-(2-amino-2-carboxyethyl)benzoic acid
  SITE 7: note (S)-2-amino-5-(4-(2-aminoethyl)piperidin-1-yl)-5-oxopentano ic acid, useful for stapling/stapled with another amino acid residue comprising a side chain acid group to form a staple through the amino group in the side chain
  SITE 11: note (S)-3-amino-1-((pent-4-en-1-yloxy)carbonyl)pyrrolidine-3-ca rboxylic acid, useful for stapling/stapled with another amino acid residue comprising an olefin group to form a staple through the olefin group
  SITE 13: note = (S)-2-amino-3-(3,4-dichlorophenyl)propanoic acid
  SITE 14: note = L-glutamic acid, useful for stapling/stapled with another amino acid residue comprising a side chain amino group to form a staple through the 4-carboxyl group
  SITE 14: note = C-term amino
XDLXDXXAFAXFXE

SEQ ID NO: 1487 - protein, 14 aa, synthetic construct
  SITE 1: note = N-term Acetic Acid
  SITE 1: note = (R)-2-allylpyrrolidine-2-carboxylic acid, useful for stapling/stapled with another amino acid residue comprising an olefin group to form a staple through the olefin group
  VARIANT 4: note = 2-amino-2-(pent-4-en-1-yl)hept-6-enoic acid, useful for stapling/stapled with another amino acid residue comprising an olefin group to form a staple through one of the two olefin groups and/or with another amino acid residue comprising an olefin group to form a staple through the other of the two olefin groups
  SITE 6: note = (S)-3-(2-amino-2-carboxyethyl)benzoic acid
  SITE 7: note = L-glutamic acid, useful for stapling/stapled with another amino acid residue comprising a side chain amino group to form a staple through the 4-carboxyl group
  SITE 11: note (S)-3-amino-1-((pent-4-en-1-yloxy)carbonyl)pyrrolidine-3-ca rboxylic acid, useful for stapling/stapled with another amino acid residue comprising an olefin group to form a staple through the olefin group
  SITE 13: note = (S)-2-amino-3-(3,4-dichlorophenyl)propanoic acid
  SITE 14: note (S)-2-amino-5-(4-(2-aminoethyl)piperidin-1-yl)-5-oxopentano ic acid, useful for stapling/stapled with another amino acid residue comprising a side chain acid group to form a staple through the amino group in the side chain
  SITE 14: note = C-term amino
XDLXDXEAFLXFXX

SEQ ID NO: 1488 - protein, 14 aa, synthetic construct
  SITE 1: note = N-term Acetic Acid
  SITE 1: note = (R)-2-allylpyrrolidine-2-carboxylic acid, useful for stapling/stapled with another amino acid residue comprising an olefin group to form a staple through the olefin group
  VARIANT 4: note = 2-amino-2-(pent-4-en-1-yl)hept-6-enoic acid, useful for stapling/stapled with another amino acid residue comprising an olefin group to form a staple through one of the two olefin groups and/or with another amino acid residue comprising an olefin group to form a staple through the other of the two olefin groups
  SITE 6: note = (S)-3-(2-amino-2-carboxyethyl)benzoic acid
  SITE 7: note = L-glutamic acid, useful for stapling/stapled with another amino acid residue comprising a side chain amino group to form a staple through the 4-carboxyl group
  SITE 11: note (S)-3-amino-1-((pent-4-en-1-yloxy)carbonyl)pyrrolidine-3-ca rboxylic acid, useful for stapling/stapled with another amino acid residue comprising an olefin group to form a staple through the olefin group
  SITE 13: note = (S)-2-amino-3-(3,4-dichlorophenyl)propanoic acid
  SITE 14: note (S)-2-amino-5-(4-(2-aminoethyl)piperidin-1-yl)-5-oxopentano ic acid, useful for stapling/stapled with another amino acid residue comprising a side chain acid group to form a staple through the amino group in the side chain
  SITE 14: note = C-term amino
XDLXDXEAFVXFXX

SEQ ID NO: 1489 - protein, 14 aa, synthetic construct
  SITE 1: note = N-term Acetic Acid
  SITE 1: note = (R)-2-allylpyrrolidine-2-carboxylic acid, useful for stapling/stapled with another amino acid residue comprising an olefin group to form a staple through the olefin group
  VARIANT 4: note = 2-amino-2-(pent-4-en-1-yl)hept-6-enoic acid, useful for stapling/stapled with another amino acid residue comprising an olefin group to form a staple through one of the two olefin groups and/or with another amino acid residue comprising an olefin group to form a staple through the other of the two olefin groups
  SITE 6: note = (S)-3-(2-amino-2-carboxyethyl)benzoic acid
  SITE 7: note = L-glutamic acid, useful for stapling/stapled with another amino acid residue comprising a side chain amino group to form a staple through the 4-carboxyl group
  SITE 11: note (S)-3-amino-1-((pent-4-en-1-yloxy)carbonyl)pyrrolidine-3-ca rboxylic acid, useful for stapling/stapled with another amino acid residue comprising an olefin group to form a staple through the olefin group
  SITE 13: note = (S)-2-amino-3-(3,4-dichlorophenyl)propanoic acid
  SITE 14: note (S)-2-amino-5-(4-(2-aminoethyl)piperidin-1-yl)-5-oxopentano ic acid, useful for stapling/stapled with another amino acid residue comprising a side chain acid group to form a staple through the amino group in the side chain
  SITE 14: note = C-term amino
XDLXDXEAFAXFXX

SEQ ID NO: 1490 - protein, 15 aa, synthetic construct
  SITE 1: note = N-term Acetic Acid
  SITE 1: note = (S)-2-amino-2-methyloct-7-enoic acid, useful for stapling/stapled with another amino acid residue comprising an olefin group to form a staple through the olefin group
  SITE 4: note = (S)-2-amino-3,3-diphenylpropanoic acid
  VARIANT 5: note = 2-amino-2-(pent-4-en-1-yl)hept-6-enoic acid, useful for stapling/stapled with another amino acid residue comprising an olefin group to form a staple through one of the two olefin groups and/or with another amino acid residue comprising an olefin group to form a staple through the other of the two olefin groups
  SITE 7: note = (S)-3-(2-amino-2-carboxyethyl)benzoic acid
  SITE 8: note = 2-amino-2-methylpropanoic acid
  SITE 11: note = L-lysine, useful for stapling/stapled with another amino acid residue comprising a side chain acid group to form a staple through the 6-amino group
  SITE 12: note (S)-3-amino-1-((but-3-en-1-yloxy)carbonyl)pyrrolidine-3-car boxylic acid, useful for stapling/stapled with another amino acid residue comprising an olefin group to form a staple through the olefin group
  SITE 14: note = (S)-2-amino-3-(3,4-dichlorophenyl)propanoic acid
  SITE 15: note = L-glutamic acid, useful for stapling/stapled with another amino acid residue comprising a side chain amino group to form a staple through the 4-carboxyl group
  SITE 15: note = C-term amino
XEDXXDXXAFKXFXE

SEQ ID NO: 1491 - protein, 15 aa, synthetic construct
  SITE 1: note = N-term Acetic Acid
  SITE 1: note = (S)-2-amino-2-methyloct-7-enoic acid, useful for stapling/stapled with another amino acid residue comprising an olefin group to form a staple through the olefin group
  SITE 4: note = (S)-2-amino-3,3-diphenylpropanoic acid
  VARIANT 5: note = 2-amino-2-(pent-4-en-1-yl)hept-6-enoic acid, useful for stapling/stapled with another amino acid residue comprising an olefin group to form a staple through one of the two olefin groups and/or with another amino acid residue comprising an olefin group to form a staple through the other of the two olefin groups
  SITE 7: note = (S)-3-(2-amino-2-carboxyethyl)benzoic acid
  SITE 8: note = 2-amino-2-methylpropanoic acid
  SITE 11: note = L-lysine, useful for stapling/stapled with another amino acid residue comprising a side chain acid group to form a staple through the 6-amino group
  SITE 12: note (S)-3-amino-1-((but-3-en-1-yloxy)carbonyl)pyrrolidine-3-car boxylic acid, useful for stapling/stapled with another amino acid residue comprising an olefin group to form a staple through the olefin group
  SITE 14: note = (S)-2-amino-3-(benzo[b]thiophen-3-yl)propanoic acid
  SITE 15: note = L-glutamic acid, useful for stapling/stapled with another amino acid residue comprising a side chain amino group to form a staple through the 4-carboxyl group
  SITE 15: note = C-term amino
XEDXXDXXAFKXFXE

SEQ ID NO: 1492 - protein, 15 aa, synthetic construct
  SITE 1: note = N-term Acetic Acid
  SITE 1: note = (S)-2-amino-2-methyloct-7-enoic acid, useful for stapling/stapled with another amino acid residue comprising an olefin group to form a staple through the olefin group
  SITE 4: note = (S)-2-amino-3,3-diphenylpropanoic acid
  VARIANT 5: note = 2-amino-2-(pent-4-en-1-yl)hept-6-enoic acid, useful for stapling/stapled with another amino acid residue comprising an olefin group to form a staple through one of the two olefin groups and/or with another amino acid residue comprising an olefin group to form a staple through the other of the two olefin groups
  SITE 7: note = (S)-3-(2-amino-2-carboxyethyl)benzoic acid
  SITE 8: note = 2-amino-2-methylpropanoic acid
  SITE 11: note = L-lysine, useful for stapling/stapled with another amino acid residue comprising a side chain acid group to form a staple through the 6-amino group
  SITE 12: note (S)-3-amino-1-((but-3-en-1-yloxy)carbonyl)pyrrolidine-3-car boxylic acid, useful for stapling/stapled with another amino acid residue comprising an olefin group to form a staple through the olefin group
  SITE 13: note = (S)-2-amino-3-(thiophen-3-yl)propanoic acid
  SITE 14: note = (S)-2-amino-3-(benzo[b]thiophen-3-yl)propanoic acid
  SITE 15: note = L-glutamic acid, useful for stapling/stapled with another amino acid residue comprising a side chain amino group to form a staple through the 4-carboxyl group
  SITE 15: note = C-term amino
XEDXXDXXAFKXXXE

SEQ ID NO: 1493 - protein, 15 aa, synthetic construct
  SITE 1: note = N-term Acetic Acid
  SITE 1: note = (S)-2-amino-2-methyloct-7-enoic acid, useful for stapling/stapled with another amino acid residue comprising an olefin group to form a staple through the olefin group
  SITE 4: note = (S)-2-amino-3,3-diphenylpropanoic acid
  VARIANT 5: note = 2-amino-2-(pent-4-en-1-yl)hept-6-enoic acid, useful for stapling/stapled with another amino acid residue comprising an olefin group to form a staple through one of the two olefin groups and/or with another amino acid residue comprising an olefin group to form a staple through the other of the two olefin groups
  SITE 7: note = (S)-3-(2-amino-2-carboxyethyl)benzoic acid
  SITE 11: note = L-lysine, useful for stapling/stapled with another amino acid residue comprising a side chain acid group to form a staple through the 6-amino group
  SITE 12: note (S)-3-amino-1-((but-3-en-1-yloxy)carbonyl)pyrrolidine-3-car boxylic acid, useful for stapling/stapled with another amino acid residue comprising an olefin group to form a staple through the olefin group
  SITE 14: note = (S)-2-amino-3-(3,4-dichlorophenyl)propanoic acid
  SITE 15: note = L-glutamic acid, useful for stapling/stapled with another amino acid residue comprising a side chain amino group to form a staple through the 4-carboxyl group
  SITE 15: note = C-term amino
XEDXXDXLAFKXFXE

SEQ ID NO: 1494 - protein, 15 aa, synthetic construct
  SITE 1: note = N-term Acetic Acid
  SITE 1: note = (S)-2-amino-2-methyloct-7-enoic acid, useful for stapling/stapled with another amino acid residue comprising an olefin group to form a staple through the olefin group
  SITE 4: note = (S)-2-amino-3,3-diphenylpropanoic acid
  VARIANT 5: note = 2-amino-2-(pent-4-en-1-yl)hept-6-enoic acid, useful for stapling/stapled with another amino acid residue comprising an olefin group to form a staple through one of the two olefin groups and/or with another amino acid residue comprising an olefin group to form a staple through the other of the two olefin groups
  SITE 7: note = (S)-3-(2-amino-2-carboxyethyl)benzoic acid
  SITE 11: note = L-lysine, useful for stapling/stapled with another amino acid residue comprising a side chain acid group to form a staple through the 6-amino group
  SITE 12: note (S)-3-amino-1-((but-3-en-1-yloxy)carbonyl)pyrrolidine-3-car boxylic acid, useful for stapling/stapled with another amino acid residue comprising an olefin group to form a staple through the olefin group
  SITE 14: note = (S)-2-amino-3-(benzo[b]thiophen-3-yl)propanoic acid
  SITE 15: note = L-glutamic acid, useful for stapling/stapled with another amino acid residue comprising a side chain amino group to form a staple through the 4-carboxyl group
  SITE 15: note = C-term amino
XEDXXDXLAFKXFXE

SEQ ID NO: 1495 - protein, 15 aa, synthetic construct
  SITE 1: note = N-term Acetic Acid
  SITE 1: note = (S)-2-amino-2-methyloct-7-enoic acid, useful for stapling/stapled with another amino acid residue comprising an olefin group to form a staple through the olefin group
  SITE 4: note = (S)-2-amino-3,3-diphenylpropanoic acid
  VARIANT 5: note = 2-amino-2-(pent-4-en-1-yl)hept-6-enoic acid, useful for stapling/stapled with another amino acid residue comprising an olefin group to form a staple through one of the two olefin groups and/or with another amino acid residue comprising an olefin group to form a staple through the other of the two olefin groups
  SITE 7: note = (S)-3-(2-amino-2-carboxyethyl)benzoic acid
  SITE 11: note = L-lysine, useful for stapling/stapled with another amino acid residue comprising a side chain acid group to form a staple through the 6-amino group
  SITE 12: note (S)-3-amino-1-((but-3-en-1-yloxy)carbonyl)pyrrolidine-3-car boxylic acid, useful for stapling/stapled with another amino acid residue comprising an olefin group to form a staple through the olefin group
  SITE 13: note = (S)-2-amino-3-(thiophen-3-yl)propanoic acid
  SITE 14: note = (S)-2-amino-3-(benzo[b]thiophen-3-yl)propanoic acid
  SITE 15: note = L-glutamic acid, useful for stapling/stapled with another amino acid residue comprising a side chain amino group to form a staple through the 4-carboxyl group
  SITE 15: note = C-term amino
XEDXXDXLAFKXXXE

SEQ ID NO: 1496 - protein, 16 aa, synthetic construct
  SITE 1: note = N-term Acetic Acid
  SITE 1: note = (S)-2-amino-2-methyloct-7-enoic acid, useful for stapling/stapled with another amino acid residue comprising an olefin group to form a staple through the olefin group
  SITE 4: note = (S)-2-amino-3,3-diphenylpropanoic acid
  VARIANT 5: note = 2-amino-2-(pent-4-en-1-yl)hept-6-enoic acid, useful for stapling/stapled with another amino acid residue comprising an olefin group to form a staple through one of the two olefin groups and/or with another amino acid residue comprising an olefin group to form a staple through the other of the two olefin groups
  SITE 7: note = (S)-3-(2-amino-2-carboxyethyl)benzoic acid
  SITE 8: note = 2-amino-2-methylpropanoic acid
  SITE 11: note = L-lysine, useful for stapling/stapled with another amino acid residue comprising a side chain acid group to form a staple through the 6-amino group
  SITE 12: note (S)-3-amino-1-((but-3-en-1-yloxy)carbonyl)pyrrolidine-3-car boxylic acid, useful for stapling/stapled with another amino acid residue comprising an olefin group to form a staple through the olefin group
  SITE 14: note = (S)-2-amino-3-(3,4-dichlorophenyl)propanoic acid
  SITE 15: note = L-glutamic acid, useful for stapling/stapled with another amino acid residue comprising a side chain amino group to form a staple through the 4-carboxyl group
  SITE 16: note = C-term amino
XEDXXDXXAFKXFXEV

SEQ ID NO: 1497 - protein, 16 aa, synthetic construct
  SITE 1: note = N-term Acetic Acid
  SITE 1: note = (S)-2-amino-2-methyloct-7-enoic acid, useful for stapling/stapled with another amino acid residue comprising an olefin group to form a staple through the olefin group
  SITE 4: note = (S)-2-amino-3,3-diphenylpropanoic acid
  VARIANT 5: note = 2-amino-2-(pent-4-en-1-yl)hept-6-enoic acid, useful for stapling/stapled with another amino acid residue comprising an olefin group to form a staple through one of the two olefin groups and/or with another amino acid residue comprising an olefin group to form a staple through the other of the two olefin groups
  SITE 7: note = (S)-3-(2-amino-2-carboxyethyl)benzoic acid
  SITE 8: note = 2-amino-2-methylpropanoic acid
  SITE 11: note = L-lysine, useful for stapling/stapled with another amino acid residue comprising a side chain acid group to form a staple through the 6-amino group
  SITE 12: note (S)-3-amino-1-((but-3-en-1-yloxy)carbonyl)pyrrolidine-3-car boxylic acid, useful for stapling/stapled with another amino acid residue comprising an olefin group to form a staple through the olefin group
  SITE 13: note = (S)-2-amino-3-(thiophen-3-yl)propanoic acid
  SITE 14: note = (S)-2-amino-3-(3,4-dichlorophenyl)propanoic acid
  SITE 15: note = L-glutamic acid, useful for stapling/stapled with another amino acid residue comprising a side chain amino group to form a staple through the 4-carboxyl group
  SITE 16: note = C-term amino
XEDXXDXXAFKXXXEV

SEQ ID NO: 1498 - protein, 15 aa, synthetic construct
  SITE 1: note = N-term Acetic Acid
  SITE 1: note = (S)-2-amino-2-methylhept-6-enoic acid, useful for stapling/stapled with another amino acid residue comprising an olefin group to form a staple through the olefin group
  VARIANT 5: note = 2-amino-2-(pent-4-en-1-yl)hept-6-enoic acid, useful for stapling/stapled with another amino acid residue comprising an olefin group to form a staple through one of the two olefin groups and/or with another amino acid residue comprising an olefin group to form a staple through the other of the two olefin groups
  SITE 7: note = (S)-3-(2-amino-2-carboxyethyl)benzoic acid
  SITE 11: note = L-lysine, useful for stapling/stapled with another amino acid residue comprising a side chain acid group to form a staple through the 6-amino group
  SITE 12: note (S)-3-amino-1-((but-3-en-1-yloxy)carbonyl)pyrrolidine-3-car boxylic acid, useful for stapling/stapled with another amino acid residue comprising an olefin group to form a staple through the olefin group
  SITE 13: note = (S)-2-amino-3-(thiophen-3-yl)propanoic acid
  SITE 14: note = (S)-2-amino-3-(benzo[b]thiophen-3-yl)propanoic acid
  SITE 15: note = L-glutamic acid, useful for stapling/stapled with another amino acid residue comprising a side chain amino group to form a staple through the 4-carboxyl group
  SITE 15: note = C-term amino
XLDVXDXLAFKXXXE

SEQ ID NO: 1499 - protein, 15 aa, synthetic construct
  SITE 1: note = N-term Acetic Acid
  SITE 1: note = (S)-2-amino-2-methylhept-6-enoic acid, useful for stapling/stapled with another amino acid residue comprising an olefin group to form a staple through the olefin group
  SITE 4: note = (S)-2-amino-2-cyclohexylacetic acid
  VARIANT 5: note = 2-amino-2-(pent-4-en-1-yl)hept-6-enoic acid, useful for stapling/stapled with another amino acid residue comprising an olefin group to form a staple through one of the two olefin groups and/or with another amino acid residue comprising an olefin group to form a staple through the other of the two olefin groups
  SITE 7: note = (S)-3-(2-amino-2-carboxyethyl)benzoic acid
  SITE 11: note = L-lysine, useful for stapling/stapled with another amino acid residue comprising a side chain acid group to form a staple through the 6-amino group
  SITE 12: note (S)-3-amino-1-((but-3-en-1-yloxy)carbonyl)pyrrolidine-3-car boxylic acid, useful for stapling/stapled with another amino acid residue comprising an olefin group to form a staple through the olefin group
  SITE 13: note = (S)-2-amino-3-(thiophen-3-yl)propanoic acid
  SITE 14: note = (S)-2-amino-3-(benzo[b]thiophen-3-yl)propanoic acid
  SITE 15: note = L-glutamic acid, useful for stapling/stapled with another amino acid residue comprising a side chain amino group to form a staple through the 4-carboxyl group
  SITE 15: note = C-term amino
XLDXXDXLAFKXXXE

SEQ ID NO: 1500 - protein, 15 aa, synthetic construct
  SITE 1: note = N-term Acetic Acid
  SITE 1: note = (S)-2-amino-2-methyloct-7-enoic acid, useful for stapling/stapled with another amino acid residue comprising an olefin group to form a staple through the olefin group
  VARIANT 5: note = 2-amino-2-(pent-4-en-1-yl)hept-6-enoic acid, useful for stapling/stapled with another amino acid residue comprising an olefin group to form a staple through one of the two olefin groups and/or with another amino acid residue comprising an olefin group to form a staple through the other of the two olefin groups
  SITE 7: note = (S)-3-(2-amino-2-carboxyethyl)benzoic acid
  SITE 11: note = L-lysine, useful for stapling/stapled with another amino acid residue comprising a side chain acid group to form a staple through the 6-amino group
  SITE 12: note (S)-3-amino-1-((but-3-en-1-yloxy)carbonyl)pyrrolidine-3-car boxylic acid, useful for stapling/stapled with another amino acid residue comprising an olefin group to form a staple through the olefin group
  SITE 13: note = (S)-2-amino-3-(thiophen-3-yl)propanoic acid
  SITE 14: note = (S)-2-amino-3-(benzo[b]thiophen-3-yl)propanoic acid
  SITE 15: note = L-glutamic acid, useful for stapling/stapled with another amino acid residue comprising a side chain amino group to form a staple through the 4-carboxyl group
  SITE 15: note = C-term amino
XLDVXDXLAFKXXXE

SEQ ID NO: 1501 - protein, 15 aa, synthetic construct
  SITE 1: note = N-term Acetic Acid
  SITE 1: note = (S)-2-amino-2-methyloct-7-enoic acid, useful for stapling/stapled with another amino acid residue comprising an olefin group to form a staple through the olefin group
  VARIANT 5: note = 2-amino-2-(pent-4-en-1-yl)hept-6-enoic acid, useful for stapling/stapled with another amino acid residue comprising an olefin group to form a staple through one of the two olefin groups and/or with another amino acid residue comprising an olefin group to form a staple through the other of the two olefin groups
  SITE 7: note = (S)-3-(2-amino-2-carboxyethyl)benzoic acid
  SITE 8: note = 2-amino-2-methylpropanoic acid
  SITE 11: note = L-lysine, useful for stapling/stapled with another amino acid residue comprising a side chain acid group to form a staple through the 6-amino group
  SITE 12: note (S)-3-amino-1-((but-3-en-1-yloxy)carbonyl)pyrrolidine-3-car boxylic acid, useful for stapling/stapled with another amino acid residue comprising an olefin group to form a staple through the olefin group
  SITE 13: note = (S)-2-amino-3-(thiophen-3-yl)propanoic acid
  SITE 14: note = (S)-2-amino-3-(benzo[b]thiophen-3-yl)propanoic acid
  SITE 15: note = L-glutamic acid, useful for stapling/stapled with another amino acid residue comprising a side chain amino group to form a staple through the 4-carboxyl group
  SITE 15: note = C-term amino
XLDVXDXXAFKXXXE

SEQ ID NO: 1502 - protein, 15 aa, synthetic construct
  SITE 1: note = N-term Acetic Acid
  SITE 1: note = (S)-2-amino-2-methyloct-7-enoic acid, useful for stapling/stapled with another amino acid residue comprising an olefin group to form a staple through the olefin group
  SITE 4: note = (S)-2-amino-3,3-diphenylpropanoic acid
  VARIANT 5: note = 2-amino-2-(pent-4-en-1-yl)hept-6-enoic acid, useful for stapling/stapled with another amino acid residue comprising an olefin group to form a staple through one of the two olefin groups and/or with another amino acid residue comprising an olefin group to form a staple through the other of the two olefin groups
  SITE 7: note = (S)-3-(2-amino-2-carboxyethyl)benzoic acid
  SITE 8: note = 2-amino-2-methylpropanoic acid
  SITE 11: note = L-lysine, useful for stapling/stapled with another amino acid residue comprising a side chain acid group to form a staple through the 6-amino group
  SITE 12: note (S)-3-amino-1-((but-3-en-1-yloxy)carbonyl)pyrrolidine-3-car boxylic acid, useful for stapling/stapled with another amino acid residue comprising an olefin group to form a staple through the olefin group
  SITE 13: note = (S)-2-amino-3-(thiophen-3-yl)propanoic acid
  SITE 14: note = (S)-2-amino-3-(benzo[b]thiophen-3-yl)propanoic acid
  SITE 15: note = L-glutamic acid, useful for stapling/stapled with another amino acid residue comprising a side chain amino group to form a staple through the 4-carboxyl group
  SITE 15: note = C-term amino
XLDXXDXXAFKXXXE

SEQ ID NO: 1503 - protein, 16 aa, synthetic construct
  SITE 1: note = N-term Acetic Acid
  SITE 2: note = (S)-2-amino-2-methyloct-7-enoic acid, useful for stapling/stapled with another amino acid residue comprising an olefin group to form a staple through the olefin group
  VARIANT 6: note = 2-amino-2-(pent-4-en-1-yl)hept-6-enoic acid, useful for stapling/stapled with another amino acid residue comprising an olefin group to form a staple through one of the two olefin groups and/or with another amino acid residue comprising an olefin group to form a staple through the other of the two olefin groups
  SITE 8: note = (S)-3-(2-amino-2-carboxyethyl)benzoic acid
  SITE 9: note = 2-amino-2-methylpropanoic acid
  SITE 12: note = L-lysine, useful for stapling/stapled with another amino acid residue comprising a side chain acid group to form a staple through the 6-amino group
  SITE 13: note (S)-3-amino-1-((but-3-en-1-yloxy)carbonyl)pyrrolidine-3-car boxylic acid, useful for stapling/stapled with another amino acid residue comprising an olefin group to form a staple through the olefin group
  SITE 14: note = (S)-2-amino-3-(thiophen-3-yl)propanoic acid
  SITE 15: note = (S)-2-amino-3-(benzo[b]thiophen-3-yl)propanoic acid
  SITE 16: note = L-glutamic acid, useful for stapling/stapled with another amino acid residue comprising a side chain amino group to form a staple through the 4-carboxyl group
  SITE 16: note = C-term amino
PXLDVXDXXAFKXXXE

SEQ ID NO: 1504 - protein, 16 aa, synthetic construct
  SITE 1: note = N-term Acetic Acid
  SITE 2: note = (S)-2-amino-2-methyloct-7-enoic acid, useful for stapling/stapled with another amino acid residue comprising an olefin group to form a staple through the olefin group
  SITE 5: note = (S)-2-amino-2-cyclohexylacetic acid
  VARIANT 6: note = 2-amino-2-(pent-4-en-1-yl)hept-6-enoic acid, useful for stapling/stapled with another amino acid residue comprising an olefin group to form a staple through one of the two olefin groups and/or with another amino acid residue comprising an olefin group to form a staple through the other of the two olefin groups
  SITE 8: note = (S)-3-(2-amino-2-carboxyethyl)benzoic acid
  SITE 9: note = 2-amino-2-methylpropanoic acid
  SITE 12: note = L-lysine, useful for stapling/stapled with another amino acid residue comprising a side chain acid group to form a staple through the 6-amino group
  SITE 13: note (S)-3-amino-1-((but-3-en-1-yloxy)carbonyl)pyrrolidine-3-car boxylic acid, useful for stapling/stapled with another amino acid residue comprising an olefin group to form a staple through the olefin group
  SITE 14: note = (S)-2-amino-3-(thiophen-3-yl)propanoic acid
  SITE 15: note = (S)-2-amino-3-(benzo[b]thiophen-3-yl)propanoic acid
  SITE 16: note = L-glutamic acid, useful for stapling/stapled with another amino acid residue comprising a side chain amino group to form a staple through the 4-carboxyl group
  SITE 16: note = C-term amino
PXLDXXDXXAFKXXXE

SEQ ID NO: 1505 - protein, 15 aa, synthetic construct
  SITE 1: note = N-term Acetic Acid
  SITE 1: note = (R)-2-allylpyrrolidine-2-carboxylic acid, stapled with another amino acid residue comprising an olefin group to form a staple through the olefin group, E olefin in the staple
  SITE 3: note = (S)-2-amino-4,4-dimethylpentanoic acid
  VARIANT 4: note = 2-amino-2-(pent-4-en-1-yl)hept-6-enoic acid, stapled with another amino acid residue comprising an olefin group to form a staple through one of the two olefin groups and with another amino acid residue comprising an olefin group to form a staple through the other of the two olefin groups, S configuration
  SITE 6: note = (S)-3-(2-amino-2-carboxyethyl)benzoic acid
  SITE 7: note = 2-amino-2-methylpropanoic acid
  SITE 9: note = (S)-2-amino-3-(thiophen-3-yl)propanoic acid
  SITE 10: note = L-lysine, stapled with another amino acid residue comprising a side chain acid group to form a staple through the 6-amino group
  SITE 11: note (S)-3-amino-1-((pent-4-en-1-yloxy)carbonyl)pyrrolidine-3-ca rboxylic acid, stapled with another amino acid residue comprising an olefin group to form a staple through the olefin group, Z olefin in the staple
  SITE 12: note = (S)-2-amino-3-(thiophen-3-yl)propanoic acid
  SITE 13: note = (S)-2-amino-3-(benzo[b]thiophen-3-yl)propanoic acid
  SITE 14: note = L-glutamic acid, stapled with another amino acid residue comprising a side chain amino group to form a staple through the 4-carboxyl group
  SITE 15: note = C-term amino
XDXXDXXAXKXXXEA

SEQ ID NO: 1506 - protein, 15 aa, synthetic construct
  SITE 1: note = N-term Acetic Acid
  SITE 1: note = (R)-2-allylpyrrolidine-2-carboxylic acid, stapled with another amino acid residue comprising an olefin group to form a staple through the olefin group, E olefin in the staple
  SITE 3: note = (S)-2-amino-4,4-dimethylpentanoic acid
  VARIANT 4: note = 2-amino-2-(pent-4-en-1-yl)hept-6-enoic acid, stapled with another amino acid residue comprising an olefin group to form a staple through one of the two olefin groups and with another amino acid residue comprising an olefin group to form a staple through the other of the two olefin groups, S configuration
  SITE 6: note = (S)-3-(2-amino-2-carboxyethyl)benzoic acid
  SITE 7: note = 2-amino-2-methylpropanoic acid
  SITE 10: note = Cysteine, sulfur bonded to the methyl at position 1 of 1,3-dimethylbenzene, stapled with another thiol through the methyl at position 3 of 1,3-dimethylbenzene
  SITE 11: note (S)-3-amino-1-((pent-4-en-1-yloxy)carbonyl)pyrrolidine-3-ca rboxylic acid, stapled with another amino acid residue comprising an olefin group to form a staple through the olefin group, E olefin in the staple
  SITE 12: note = (S)-2-amino-3-(2-(trifluoromethyl)phenyl)propanoic acid
  SITE 13: note = (S)-2-amino-3-(benzo[b]thiophen-3-yl)propanoic acid
  SITE 15: note = C-term amino
XDXXDXXAFCXXXCA

SEQ ID NO: 1507 - protein, 15 aa, synthetic construct
  SITE 1: note = N-term Acetic Acid
  SITE 1: note = (R)-2-allylpyrrolidine-2-carboxylic acid, stapled with another amino acid residue comprising an olefin group to form a staple through the olefin group, E olefin in the staple
  SITE 3: note = (S)-2-amino-4,4-dimethylpentanoic acid
  VARIANT 4: note = 2-amino-2-(pent-4-en-1-yl)hept-6-enoic acid, stapled with another amino acid residue comprising an olefin group to form a staple through one of the two olefin groups and with another amino acid residue comprising an olefin group to form a staple through the other of the two olefin groups, R configuration
  SITE 6: note = (S)-3-(2-amino-2-carboxyethyl)benzoic acid
  SITE 7: note = 2-amino-2-methylpropanoic acid
  SITE 10: note = Cysteine, sulfur bonded to the methyl at position 1 of 1,3-dimethylbenzene, stapled with another thiol through the methyl at position 3 of 1,3-dimethylbenzene
  SITE 11: note (S)-3-amino-1-((pent-4-en-1-yloxy)carbonyl)pyrrolidine-3-ca rboxylic acid, stapled with another amino acid residue comprising an olefin group to form a staple through the olefin group, E olefin in the staple
  SITE 12: note = (S)-2-amino-3-(2-(trifluoromethyl)phenyl)propanoic acid
  SITE 13: note = (S)-2-amino-3-(benzo[b]thiophen-3-yl)propanoic acid
  SITE 15: note = C-term amino
XDXXDXXAFCXXXCA

SEQ ID NO: 1508 - protein, 15 aa, synthetic construct
  SITE 1: note = N-term Acetic Acid
  SITE 1: note = (R)-2-allylpyrrolidine-2-carboxylic acid, stapled with another amino acid residue comprising an olefin group to form a staple through the olefin group, Z olefin in the staple
  SITE 3: note = (S)-2-amino-4,4-dimethylpentanoic acid
  VARIANT 4: note = 2-amino-2-(pent-4-en-1-yl)hept-6-enoic acid, stapled with another amino acid residue comprising an olefin group to form a staple through one of the two olefin groups and with another amino acid residue comprising an olefin group to form a staple through the other of the two olefin groups, S configuration
  SITE 6: note = (S)-3-(2-amino-2-carboxyethyl)benzoic acid
  SITE 7: note = 2-amino-2-methylpropanoic acid
  SITE 10: note = Cysteine, sulfur bonded to the methyl at position 1 of 1,3-dimethylbenzene, stapled with another thiol through the methyl at position 3 of 1,3-dimethylbenzene
  SITE 11: note (S)-3-amino-1-((pent-4-en-1-yloxy)carbonyl)pyrrolidine-3-ca rboxylic acid, stapled with another amino acid residue comprising an olefin group to form a staple through the olefin group, E olefin in the staple
  SITE 12: note = (S)-2-amino-3-(2-(trifluoromethyl)phenyl)propanoic acid
  SITE 13: note = (S)-2-amino-3-(benzo[b]thiophen-3-yl)propanoic acid
  SITE 15: note = C-term amino
XDXXDXXAFCXXXCA

SEQ ID NO: 1509 - protein, 15 aa, synthetic construct
  SITE 1: note = N-term Acetic Acid
  SITE 1: note = (R)-2-allylpyrrolidine-2-carboxylic acid, stapled with another amino acid residue comprising an olefin group to form a staple through the olefin group, Z olefin in the staple
  SITE 3: note = (S)-2-amino-4,4-dimethylpentanoic acid
  VARIANT 4: note = 2-amino-2-(pent-4-en-1-yl)hept-6-enoic acid, stapled with another amino acid residue comprising an olefin group to form a staple through one of the two olefin groups and with another amino acid residue comprising an olefin group to form a staple through the other of the two olefin groups, R configuration
  SITE 6: note = (S)-3-(2-amino-2-carboxyethyl)benzoic acid
  SITE 7: note = 2-amino-2-methylpropanoic acid
  SITE 10: note = Cysteine, sulfur bonded to the methyl at position 1 of 1,3-dimethylbenzene, stapled with another thiol through the methyl at position 3 of 1,3-dimethylbenzene
  SITE 11: note (S)-3-amino-1-((pent-4-en-1-yloxy)carbonyl)pyrrolidine-3-ca rboxylic acid, stapled with another amino acid residue comprising an olefin group to form a staple through the olefin group, E olefin in the staple
  SITE 12: note = (S)-2-amino-3-(2-(trifluoromethyl)phenyl)propanoic acid
  SITE 13: note = (S)-2-amino-3-(benzo[b]thiophen-3-yl)propanoic acid
  SITE 15: note = C-term amino
XDXXDXXAFCXXXCA

SEQ ID NO: 1510 - protein, 15 aa, synthetic construct
  SITE 1: note = N-term Acetic Acid
  SITE 1: note = (R)-2-allylpyrrolidine-2-carboxylic acid, stapled with another amino acid residue comprising an olefin group to form a staple through the olefin group, Z olefin in the staple
  SITE 3: note = (S)-2-amino-4,4-dimethylpentanoic acid
  VARIANT 4: note = 2-amino-2-(pent-4-en-1-yl)hept-6-enoic acid, stapled with another amino acid residue comprising an olefin group to form a staple through one of the two olefin groups and with another amino acid residue comprising an olefin group to form a staple through the other of the two olefin groups, S configuration
  SITE 6: note = (S)-3-(2-amino-2-carboxyethyl)benzoic acid
  SITE 7: note = 2-amino-2-methylpropanoic acid
  SITE 10: note = Cysteine, sulfur bonded to the methyl at position 1 of 1,3-dimethylbenzene, stapled with another thiol through the methyl at position 3 of 1,3-dimethylbenzene
  SITE 11: note (S)-3-amino-1-((pent-4-en-1-yloxy)carbonyl)pyrrolidine-3-ca rboxylic acid, stapled with another amino acid residue comprising an olefin group to form a staple through the olefin group, Z olefin in the staple
  SITE 12: note = (S)-2-amino-3-(2-(trifluoromethyl)phenyl)propanoic acid
  SITE 13: note = (S)-2-amino-3-(benzo[b]thiophen-3-yl)propanoic acid
  SITE 15: note = C-term amino
XDXXDXXAFCXXXCA

SEQ ID NO: 1511 - protein, 15 aa, synthetic construct
  SITE 1: note = N-term acetic acid
  SITE 1: note = (R)-2-allylpyrrolidine-2-carboxylic acid
  SITE 2: note = (S)-2-amino-4-(tert-butoxy)-4-oxobutanoic acid
  SITE 3: note = (S)-2-amino-4,4-dimethylpentanoic acid
  VARIANT 4: note = 2-amino-2-(pent-4-en-1-yl)hept-6-enoic acid
  SITE 5: note = (S)-2-amino-4-(tert-butoxy)-4-oxobutanoic acid
  SITE 6: note (S)-2-amino-3-(4-(tert-butoxycarbonyl)phenyl)propanoic acid
  SITE 7: note = 2-Aminoisobutyric acid
  SITE 10: note = L-lysine, stapled with another amino acid residue comprising a side chain acid group to form a staple through the 6-amino group
  SITE 11: note (S)-3-amino-1-((pent-4-en-1-yloxy)carbonyl)pyrrolidine-3-ca rboxylic acid
  SITE 12: note = (S)-2-amino-3-(thiophen-3-yl)propanoic acid
  SITE 13: note = (S)-2-amino-3-(benzo[b]thiophen-3-yl)propanoic acid
  SITE 14: note = L-glutamic acid, stapled with another amino acid residue comprising a side chain amino group to form a staple through the 4-carboxyl group
  SITE 15: note = C-term amine solid support
XDXXDXXAFKXXXEA

SEQ ID NO: 1512 - protein, 14 aa, synthetic construct
  SITE 1: note 2-((((9H-fluoren-9-yl)methoxy)carbonyl)amino)-4-(tert-butox y)-4-oxobutanoic acid
  SITE 2: note = (S)-2-amino-4,4-dimethylpentanoic acid
  VARIANT 3: note = 2-amino-2-(pent-4-en-1-yl)hept-6-enoic acid
  SITE 4: note = (S)-2-amino-4-(tert-butoxy)-4-oxobutanoic acid
  SITE 5: note (S)-2-amino-3-(4-(tert-butoxycarbonyl)phenyl)propanoic acid
  SITE 6: note = 2-Aminoisobutyric acid
  SITE 9: note = L-lysine, stapled with another amino acid residue comprising a side chain acid group to form a staple through the 6-amino group
  SITE 10: note (S)-3-amino-1-((pent-4-en-1-yloxy)carbonyl)pyrrolidine-3-ca rboxylic acid
  SITE 11: note = (S)-2-amino-3-(thiophen-3-yl)propanoic acid
  SITE 12: note = (S)-2-amino-3-(benzo[b]thiophen-3-yl)propanoic acid
  SITE 13: note = L-glutamic acid, stapled with another amino acid residue comprising a side chain amino group to form a staple through the 4-carboxyl group
  SITE 14: note = C-term amine solid support
DXXDXXAFKXXXEA

SEQ ID NO: 1513 - protein, 15 aa, synthetic construct
  SITE 1: note = N-term Acetic Acid
  SITE 1: note = (R)-2-allylpyrrolidine-2-carboxylic acid, stapled with another amino acid residue comprising an olefin group to form a staple through the olefin group, Z olefin in the staple
  SITE 3: note = (S)-2-amino-4,4-dimethylpentanoic acid
  VARIANT 4: note = 2-amino-2-(pent-4-en-1-yl)hept-6-enoic acid, stapled with another amino acid residue comprising an olefin group to form a staple through one of the two olefin groups and with another amino acid residue comprising an olefin group to form a staple through the other of the two olefin groups, S configuration
  SITE 6: note = (S)-3-(2-amino-2-carboxyethyl)benzoic acid
  SITE 7: note = 2-amino-2-methylpropanoic acid
  SITE 9: note = (S)-2-amino-3-(thiophen-3-yl)propanoic acid
  SITE 10: note = L-lysine, stapled with another amino acid residue comprising a side chain acid group to form a staple through the 6-amino group
  SITE 11: note (S)-3-amino-1-((pent-4-en-1-yloxy)carbonyl)pyrrolidine-3-ca rboxylic acid, stapled with another amino acid residue comprising an olefin group to form a staple through the olefin group, Z olefin in the staple
  SITE 12: note = (S)-2-amino-3-(thiophen-3-yl)propanoic acid
  SITE 13: note = (S)-2-amino-3-(benzo[b]thiophen-3-yl)propanoic acid
  SITE 14: note = L-glutamic acid, stapled with another amino acid residue comprising a side chain amino group to form a staple through the 4-carboxyl group
  SITE 15: note = C-term amino
XDXXDXXAXKXXXEA

SEQ ID NO: 1514 - protein, 15 aa, synthetic construct
  SITE 1: note = N-term Acetic Acid
  SITE 1: note = (R)-2-allylpyrrolidine-2-carboxylic acid, stapled with another amino acid residue comprising an olefin group to form a staple through the olefin group, E olefin in the staple
  SITE 3: note = (S)-2-amino-4,4-dimethylpentanoic acid
  VARIANT 4: note = 2-amino-2-(pent-4-en-1-yl)hept-6-enoic acid, stapled with another amino acid residue comprising an olefin group to form a staple through one of the two olefin groups and with another amino acid residue comprising an olefin group to form a staple through the other of the two olefin groups, R configuration
  SITE 6: note = (S)-3-(2-amino-2-carboxyethyl)benzoic acid
  SITE 7: note = 2-amino-2-methylpropanoic acid
  SITE 9: note = (S)-2-amino-3-(thiophen-3-yl)propanoic acid
  SITE 10: note = L-lysine, stapled with another amino acid residue comprising a side chain acid group to form a staple through the 6-amino group
  SITE 11: note (S)-3-amino-1-((pent-4-en-1-yloxy)carbonyl)pyrrolidine-3-ca rboxylic acid, stapled with another amino acid residue comprising an olefin group to form a staple through the olefin group, Z olefin in the staple
  SITE 12: note = (S)-2-amino-3-(thiophen-3-yl)propanoic acid
  SITE 13: note = (S)-2-amino-3-(benzo[b]thiophen-3-yl)propanoic acid
  SITE 14: note = L-glutamic acid, stapled with another amino acid residue comprising a side chain amino group to form a staple through the 4-carboxyl group
  SITE 15: note = C-term amino
XDXXDXXAXKXXXEA

SEQ ID NO: 1515 - protein, 15 aa, synthetic construct
  SITE 1: note = N-term Acetic Acid
  SITE 1: note = (R)-2-allylpyrrolidine-2-carboxylic acid, stapled with another amino acid residue comprising an olefin group to form a staple through the olefin group, Z olefin in the staple
  SITE 3: note = (S)-2-amino-4,4-dimethylpentanoic acid
  VARIANT 4: note = 2-amino-2-(pent-4-en-1-yl)hept-6-enoic acid, stapled with another amino acid residue comprising an olefin group to form a staple through one of the two olefin groups and with another amino acid residue comprising an olefin group to form a staple through the other of the two olefin groups, S configuration
  SITE 6: note = (S)-3-(2-amino-2-carboxyethyl)benzoic acid
  SITE 7: note = 1-aminocyclopentane-1-carboxylic acid
  SITE 10: note = L-lysine, stapled with another amino acid residue comprising a side chain acid group to form a staple through the 6-amino group
  SITE 11: note (S)-3-amino-1-((pent-4-en-1-yloxy)carbonyl)pyrrolidine-3-ca rboxylic acid, stapled with another amino acid residue comprising an olefin group to form a staple through the olefin group, Z olefin in the staple
  SITE 12: note = (S)-2-amino-3-(thiophen-3-yl)propanoic acid
  SITE 13: note = (S)-2-amino-3-(benzo[b]thiophen-3-yl)propanoic acid
  SITE 14: note = L-glutamic acid, stapled with another amino acid residue comprising a side chain amino group to form a staple through the 4-carboxyl group
  SITE 15: note = C-term amino
XDXXDXXAFKXXXEA

SEQ ID NO: 1516 - protein, 15 aa, synthetic construct
  SITE 1: note = N-term Acetic Acid
  SITE 1: note = (R)-2-allylpyrrolidine-2-carboxylic acid, stapled with another amino acid residue comprising an olefin group to form a staple through the olefin group, E olefin in the staple
  SITE 3: note = (S)-2-amino-4,4-dimethylpentanoic acid
  VARIANT 4: note = 2-amino-2-(pent-4-en-1-yl)hept-6-enoic acid, stapled with another amino acid residue comprising an olefin group to form a staple through one of the two olefin groups and with another amino acid residue comprising an olefin group to form a staple through the other of the two olefin groups, R configuration
  SITE 6: note = (S)-3-(2-amino-2-carboxyethyl)benzoic acid
  SITE 7: note = 1-aminocyclopentane-1-carboxylic acid
  SITE 10: note = L-lysine, stapled with another amino acid residue comprising a side chain acid group to form a staple through the 6-amino group
  SITE 11: note (S)-3-amino-1-((pent-4-en-1-yloxy)carbonyl)pyrrolidine-3-ca rboxylic acid, stapled with another amino acid residue comprising an olefin group to form a staple through the olefin group, Z olefin in the staple
  SITE 12: note = (S)-2-amino-3-(thiophen-3-yl)propanoic acid
  SITE 13: note = (S)-2-amino-3-(benzo[b]thiophen-3-yl)propanoic acid
  SITE 14: note = L-glutamic acid, stapled with another amino acid residue comprising a side chain amino group to form a staple through the 4-carboxyl group
  SITE 15: note = C-term amino
XDXXDXXAFKXXXEA

SEQ ID NO: 1517 - protein, 15 aa, synthetic construct
  SITE 1: note = N-term Acetic Acid
  SITE 1: note = (R)-2-allylpyrrolidine-2-carboxylic acid, stapled with another amino acid residue comprising an olefin group to form a staple through the olefin group, Z olefin in the staple
  SITE 3: note = (S)-2-amino-4,4-dimethylpentanoic acid
  VARIANT 4: note = 2-amino-2-(pent-4-en-1-yl)hept-6-enoic acid, stapled with another amino acid residue comprising an olefin group to form a staple through one of the two olefin groups and with another amino acid residue comprising an olefin group to form a staple through the other of the two olefin groups, R configuration
  SITE 6: note = (S)-3-(2-amino-2-carboxyethyl)benzoic acid
  SITE 7: note = 2-amino-2-methylpropanoic acid
  SITE 9: note = (S)-2-amino-3-(thiophen-3-yl)propanoic acid
  SITE 10: note = L-lysine, stapled with another amino acid residue comprising a side chain acid group to form a staple through the 6-amino group
  SITE 11: note (S)-3-amino-1-((pent-4-en-1-yloxy)carbonyl)pyrrolidine-3-ca rboxylic acid, stapled with another amino acid residue comprising an olefin group to form a staple through the olefin group, Z olefin in the staple
  SITE 12: note = (S)-2-amino-3-(thiophen-3-yl)propanoic acid
  SITE 13: note = (S)-2-amino-3-(benzo[b]thiophen-3-yl)propanoic acid
  SITE 14: note = L-glutamic acid, stapled with another amino acid residue comprising a side chain amino group to form a staple through the 4-carboxyl group
  SITE 15: note = C-term amino
XDXXDXXAXKXXXEA

SEQ ID NO: 1518 - protein, 15 aa, synthetic construct
  SITE 1: note = N-term Acetic Acid
  SITE 1: note = (R)-2-allylpyrrolidine-2-carboxylic acid, stapled with another amino acid residue comprising an olefin group to form a staple through the olefin group, E olefin in the staple
  SITE 3: note = (S)-2-amino-4,4-dimethylpentanoic acid
  VARIANT 4: note = 2-amino-2-(pent-4-en-1-yl)hept-6-enoic acid, stapled with another amino acid residue comprising an olefin group to form a staple through one of the two olefin groups and with another amino acid residue comprising an olefin group to form a staple through the other of the two olefin groups, S configuration
  SITE 6: note = (S)-3-(2-amino-2-carboxyethyl)benzoic acid
  SITE 7: note = 1-aminocyclopentane-1-carboxylic acid
  SITE 10: note = L-lysine, stapled with another amino acid residue comprising a side chain acid group to form a staple through the 6-amino group
  SITE 11: note (S)-3-amino-1-((pent-4-en-1-yloxy)carbonyl)pyrrolidine-3-ca rboxylic acid, stapled with another amino acid residue comprising an olefin group to form a staple through the olefin group, Z olefin in the staple
  SITE 12: note = (S)-2-amino-3-(thiophen-3-yl)propanoic acid
  SITE 13: note = (S)-2-amino-3-(benzo[b]thiophen-3-yl)propanoic acid
  SITE 14: note = L-glutamic acid, stapled with another amino acid residue comprising a side chain amino group to form a staple through the 4-carboxyl group
  SITE 15: note = C-term amino
XDXXDXXAFKXXXEA

SEQ ID NO: 1519 - protein, 14 aa, synthetic construct
  SITE 1: note 2-((((9H-fluoren-9-yl)methoxy)carbonyl)amino)-4-(tert-butox y)-4-oxobutanoic acid
  SITE 2: note = (S)-2-amino-4,4-dimethylpentanoic acid
  VARIANT 3: note = 2-amino-2-(pent-4-en-1-yl)hept-6-enoic acid, stapled with another amino acid residue comprising an olefin group to form a staple through one of the two olefin groups, R configuration
  SITE 4: note = (S)-2-amino-4-(tert-butoxy)-4-oxobutanoic acid
  SITE 5: note (S)-2-amino-3-(4-(tert-butoxycarbonyl)phenyl)propanoic acid
  SITE 6: note = 2-Aminoisobutyric acid
  SITE 9: note = (S)-2-amino-6-(1H-1,2,3-triazol-1-yl)hexanoic acid; stapled with another amino acid residue to form a staple through the 4-position of the triazolyl group
  SITE 10: note (S)-3-amino-1-((pent-4-en-1-yloxy)carbonyl)pyrrolidine-3-ca rboxylic acid, stapled with another amino acid residue comprising an olefin group to form a staple through the olefin group, E olefin in the staple
  SITE 11: note = (S)-2-amino-3-(thiophen-3-yl)propanoic acid
  SITE 12: note = (S)-2-amino-3-(benzo[b]thiophen-3-yl)propanoic acid
  SITE 13: note = L-alanine; stapled with another amino acid residue comprising a triazolyl group to form a staple through the terminal methyl group
  SITE 14: note = C-term protide resin
DXXDXXAFKXXXAA

SEQ ID NO: 1520 - protein, 15 aa, synthetic construct
  SITE 1: note = hex-5-enoic acid, stapled with another amino acid residue comprising an olefin group to form a staple through the olefin group, olefin in staple converted to bivalent 1,2-ethylene
  SITE 1: note = (S)-2-methylpyrrolidine-2-carboxylic acid
  SITE 3: note = (S)-2-aminopent-4-enoic acid, stapled with another amino acid residue comprising an olefin group to form a staple through the olefin group, olefin in staple converted to bivalent 1,2-ethylene
  SITE 4: note = (R)-2-amino-2-methylhept-6-enoic acid, stapled with another amino acid residue comprising an olefin group to form a staple through the olefin group, olefin in staple converted to bivalent 1,2-ethylene
  SITE 6: note = (S)-3-(2-amino-2-carboxyethyl)benzoic acid
  SITE 7: note = 2-amino-2-methylpropanoic acid
  SITE 10: note = L-lysine, stapled with another amino acid residue comprising a side chain acid group to form a staple through the 6-amino group
  SITE 11: note (S)-3-amino-1-((pent-4-en-1-yloxy)carbonyl)pyrrolidine-3-ca rboxylic acid, stapled with another amino acid residue comprising an olefin group to form a staple through the olefin group, olefin in staple converted to bivalent 1,2-ethylene
  SITE 12: note = (S)-2-amino-3-(thiophen-3-yl)propanoic acid
  SITE 13: note = (S)-2-amino-3-(benzo[b]thiophen-3-yl)propanoic acid
  SITE 14: note = L-glutamic acid, stapled with another amino acid residue comprising a side chain amino group to form a staple through the 4-carboxyl group
  SITE 15: note = C-term amino
XDXXDXXAFKXXXEA

SEQ ID NO: 1521 - protein, 15 aa, synthetic construct
  SITE 1: note = (R)-2-allylpyrrolidine-2-carboxylic acid, stapled with another amino acid residue comprising an olefin group to form a staple through the olefin group, Z olefin in the staple
  SITE 2: note = (S)-2-amino-4-(tert-butoxy)-4-oxobutanoic acid
  SITE 3: note = (S)-2-amino-4,4-dimethylpentanoic acid
  VARIANT 4: note = 2-amino-2-(pent-4-en-1-yl)hept-6-enoic acid, stapled with another amino acid residue comprising an olefin group to form a staple through one of the two olefin groups and with another amino acid residue comprising an olefin group to form a staple through the other of the two olefin groups, S configuration
  SITE 5: note = (S)-2-amino-4-(tert-butoxy)-4-oxobutanoic acid
  SITE 6: note (S)-2-amino-3-(4-(tert-butoxycarbonyl)phenyl)propanoic acid
  SITE 7: note = 2-Aminoisobutyric acid
  SITE 10: note = (S)-2-amino-6-(1H-1,2,3-triazol-1-yl)hexanoic acid; stapled with another amino acid residue to form a staple through the 4-position of the triazolyl group
  SITE 11: note (S)-3-amino-1-((pent-4-en-1-yloxy)carbonyl)pyrrolidine-3-ca rboxylic acid, stapled with another amino acid residue comprising an olefin group to form a staple through the olefin group, E olefin in the staple
  SITE 12: note = (S)-2-amino-3-(thiophen-3-yl)propanoic acid
  SITE 13: note = (S)-2-amino-3-(benzo[b]thiophen-3-yl)propanoic acid
  SITE 14: note = L-alanine; stapled with another amino acid residue comprising a triazolyl group to form a staple through the terminal methyl group
  SITE 1: note = N-term acetic acid
  SITE 15: note = C-term protide resin
XDXXDXXAFKXXXAA

SEQ ID NO: 1522 - protein, 14 aa, synthetic construct
  SITE 1: note = N-term acetic acid
  SITE 1: note = (R)-2-allylpyrrolidine-2-carboxylic acid, stapled with another amino acid residue comprising an olefin group to form a staple through the olefin group
  SITE 3: note = (S)-2-amino-4,4-dimethylpentanoic acid
  VARIANT 4: note = 2-amino-2-(pent-4-en-1-yl)hept-6-enoic acid, stapled with another amino acid residue comprising an olefin group to form a staple through one of the two olefin groups and with another amino acid residue comprising an olefin group to form a staple through the other of the two olefin groups
  SITE 6: note = (S)-3-(2-amino-2-carboxyethyl)benzoic acid
  SITE 8: note = (S)-2-amino-6-(1H-1,2,3-triazol-1-yl)hexanoic acid; stapled with another amino acid residue to form a staple through the 4-position of the triazolyl group
  SITE 10: note = L-alanine; stapled with another amino acid residue comprising a triazolyl group to form a staple through the terminal methyl group
  SITE 11: note (S)-3-amino-1-((pent-4-en-1-yloxy)carbonyl)pyrrolidine-3-ca rboxylic acid, stapled with another amino acid residue comprising an olefin group to form a staple through the olefin group
  SITE 12: note = (S)-2-amino-3-(thiophen-3-yl)propanoic acid
  SITE 13: note = (S)-2-amino-3-(benzo[b]thiophen-3-yl)propanoic acid
  SITE 14: note = C-term amino
XDXXDXGKFAXXXQ

SEQ ID NO: 1523 - protein, 15 aa, synthetic construct
  SITE 1: note = N-term acetic acid
  SITE 1: note = (R)-2-allylpyrrolidine-2-carboxylic acid, stapled with another amino acid residue comprising an olefin group to form a staple through the olefin group
  SITE 3: note = (S)-2-amino-4,4-dimethylpentanoic acid
  VARIANT 4: note = 2-amino-2-(pent-4-en-1-yl)hept-6-enoic acid, stapled with another amino acid residue comprising an olefin group to form a staple through one of the two olefin groups and with another amino acid residue comprising an olefin group to form a staple through the other of the two olefin groups
  SITE 6: note = (S)-3-(2-amino-2-carboxyethyl)benzoic acid
  SITE 7: note = 2-Aminoisobutyric acid
  SITE 10: note = D-Cysteine, sulfur bonded to the methyl at position 1 of 1,3-dimethylbenzene, stapled with another thiol through the methyl at position 3 of 1,3-dimethylbenzene
  SITE 11: note (S)-3-amino-1-((pent-4-en-1-yloxy)carbonyl)pyrrolidine-3-ca rboxylic acid, stapled with another amino acid residue comprising an olefin group to form a staple through the olefin group
  SITE 12: note (S)-3-amino-1-((pent-4-en-1-yloxy)carbonyl)pyrrolidine-3-ca rboxylic acid, stapled with another amino acid residue comprising an olefin group to form a staple through the olefin group
  SITE 13: note = (S)-2-amino-3-(benzo[b]thiophen-3-yl)propanoic acid
  SITE 14: note = D-amino acid
  SITE 15: note = C-term amino
XDXXDXXAFCXXXCA

SEQ ID NO: 1524 - protein, 14 aa, synthetic construct
  SITE 1: note = N-term Acetic Acid
  SITE 1: note = (R)-2-allylpyrrolidine-2-carboxylic acid, stapled with another amino acid residue comprising an olefin group to form a staple through the olefin group, E olefin in the staple
  SITE 3: note = (S)-2-amino-4,4-dimethylpentanoic acid
  VARIANT 4: note = 2-amino-2-(pent-4-en-1-yl)hept-6-enoic acid, stapled with another amino acid residue comprising an olefin group to form a staple through one of the two olefin groups and with another amino acid residue comprising an olefin group to form a staple through the other of the two olefin groups, R configuration
  SITE 6: note = (S)-3-(2-amino-2-carboxyethyl)benzoic acid
  SITE 7: note = (S)-2-amino-6-(1H-1,2,3-triazol-1-yl)hexanoic acid, stapled with another amino acid residue to form a staple through the 4-position of the triazolyl group
  SITE 10: note = L-alanine, stapled with another amino acid residue comprising a triazolyl group to form a staple through the terminal methyl group
  SITE 11: note (S)-3-amino-1-((pent-4-en-1-yloxy)carbonyl)pyrrolidine-3-ca rboxylic acid, stapled with another amino acid residue comprising an olefin group to form a staple through the olefin group, Z olefin in the staple
  SITE 12: note = (S)-2-amino-3-(thiophen-3-yl)propanoic acid
  SITE 13: note = (S)-2-amino-3-(benzo[b]thiophen-3-yl)propanoic acid
  SITE 14: note = C-term amino
XDXXDXXAFAXXXQ

SEQ ID NO: 1525 - protein, 14 aa, synthetic construct
  SITE 1: note = N-term Acetic Acid
  SITE 1: note = (R)-2-allylpyrrolidine-2-carboxylic acid, stapled with another amino acid residue comprising an olefin group to form a staple through the olefin group, E olefin in the staple
  SITE 3: note = (S)-2-amino-4,4-dimethylpentanoic acid
  VARIANT 4: note = 2-amino-2-(pent-4-en-1-yl)hept-6-enoic acid, stapled with another amino acid residue comprising an olefin group to form a staple through one of the two olefin groups and with another amino acid residue comprising an olefin group to form a staple through the other of the two olefin groups, S configuration
  SITE 6: note = (S)-3-(2-amino-2-carboxyethyl)benzoic acid
  SITE 7: note = (S)-2-amino-6-(1H-1,2,3-triazol-1-yl)hexanoic acid, stapled with another amino acid residue to form a staple through the 4-position of the triazolyl group
  SITE 10: note = L-alanine, stapled with another amino acid residue comprising a triazolyl group to form a staple through the terminal methyl group
  SITE 11: note (S)-3-amino-1-((pent-4-en-1-yloxy)carbonyl)pyrrolidine-3-ca rboxylic acid, stapled with another amino acid residue comprising an olefin group to form a staple through the olefin group, Z olefin in the staple
  SITE 12: note = (S)-2-amino-3-(thiophen-3-yl)propanoic acid
  SITE 13: note = (S)-2-amino-3-(benzo[b]thiophen-3-yl)propanoic acid
  SITE 14: note = C-term amino
XDXXDXXAFAXXXQ

SEQ ID NO: 1526 - protein, 14 aa, synthetic construct
  SITE 1: note = N-term Acetic Acid
  SITE 1: note = (R)-2-allylpyrrolidine-2-carboxylic acid, stapled with another amino acid residue comprising an olefin group to form a staple through the olefin group, Z olefin in the staple
  SITE 3: note = (S)-2-amino-4,4-dimethylpentanoic acid
  VARIANT 4: note = 2-amino-2-(pent-4-en-1-yl)hept-6-enoic acid, stapled with another amino acid residue comprising an olefin group to form a staple through one of the two olefin groups and with another amino acid residue comprising an olefin group to form a staple through the other of the two olefin groups, R configuration
  SITE 6: note = (S)-3-(2-amino-2-carboxyethyl)benzoic acid
  SITE 7: note = (S)-2-amino-6-(1H-1,2,3-triazol-1-yl)hexanoic acid, stapled with another amino acid residue to form a staple through the 4-position of the triazolyl group
  SITE 10: note = L-alanine, stapled with another amino acid residue comprising a triazolyl group to form a staple through the terminal methyl group
  SITE 11: note (S)-3-amino-1-((pent-4-en-1-yloxy)carbonyl)pyrrolidine-3-ca rboxylic acid, stapled with another amino acid residue comprising an olefin group to form a staple through the olefin group, Z olefin in the staple
  SITE 12: note = (S)-2-amino-3-(thiophen-3-yl)propanoic acid
  SITE 13: note = (S)-2-amino-3-(benzo[b]thiophen-3-yl)propanoic acid
  SITE 14: note = C-term amino
XDXXDXXAFAXXXQ

SEQ ID NO: 1527 - protein, 14 aa, synthetic construct
  SITE 1: note = N-term Acetic Acid
  SITE 1: note = (R)-2-allylpyrrolidine-2-carboxylic acid, stapled with another amino acid residue comprising an olefin group to form a staple through the olefin group, Z olefin in the staple
  SITE 3: note = (S)-2-amino-4,4-dimethylpentanoic acid
  VARIANT 4: note = 2-amino-2-(pent-4-en-1-yl)hept-6-enoic acid, stapled with another amino acid residue comprising an olefin group to form a staple through one of the two olefin groups and with another amino acid residue comprising an olefin group to form a staple through the other of the two olefin groups, S configuration
  SITE 6: note = (S)-3-(2-amino-2-carboxyethyl)benzoic acid
  SITE 7: note = (S)-2-amino-6-(1H-1,2,3-triazol-1-yl)hexanoic acid, stapled with another amino acid residue to form a staple through the 4-position of the triazolyl group
  SITE 10: note = L-alanine, stapled with another amino acid residue comprising a triazolyl group to form a staple through the terminal methyl group
  SITE 11: note (S)-3-amino-1-((pent-4-en-1-yloxy)carbonyl)pyrrolidine-3-ca rboxylic acid, stapled with another amino acid residue comprising an olefin group to form a staple through the olefin group, Z olefin in the staple
  SITE 12: note = (S)-2-amino-3-(thiophen-3-yl)propanoic acid
  SITE 13: note = (S)-2-amino-3-(benzo[b]thiophen-3-yl)propanoic acid
  SITE 14: note = C-term amino
XDXXDXXAFAXXXQ

SEQ ID NO: 1528 - protein, 14 aa, synthetic construct
  SITE 1: note = N-term Acetic Acid
  SITE 1: note = (R)-2-allylpyrrolidine-2-carboxylic acid, stapled with another amino acid residue comprising an olefin group to form a staple through the olefin group, Z olefin in the staple
  SITE 3: note = (S)-2-amino-4,4-dimethylpentanoic acid
  VARIANT 4: note = 2-amino-2-(pent-4-en-1-yl)hept-6-enoic acid, stapled with another amino acid residue comprising an olefin group to form a staple through one of the two olefin groups and with another amino acid residue comprising an olefin group to form a staple through the other of the two olefin groups, R configuration
  SITE 6: note = (S)-3-(2-amino-2-carboxyethyl)benzoic acid
  SITE 7: note = (S)-2-amino-6-(1H-1,2,3-triazol-1-yl)hexanoic acid, stapled with another amino acid residue to form a staple through the 4-position of the triazolyl group
  SITE 10: note = L-alanine, stapled with another amino acid residue comprising a triazolyl group to form a staple through the terminal methyl group
  SITE 11: note (S)-3-amino-1-((pent-4-en-1-yloxy)carbonyl)pyrrolidine-3-ca rboxylic acid, stapled with another amino acid residue comprising an olefin group to form a staple through the olefin group, E olefin in the staple
  SITE 12: note = (S)-2-amino-3-(thiophen-3-yl)propanoic acid
  SITE 13: note = (S)-2-amino-3-(benzo[b]thiophen-3-yl)propanoic acid
  SITE 14: note = C-term amino
XDXXDXXAFAXXXQ

SEQ ID NO: 1529 - protein, 14 aa, synthetic construct
  SITE 1: note = N-term Acetic Acid
  SITE 1: note = (R)-2-allylpyrrolidine-2-carboxylic acid, stapled with another amino acid residue comprising an olefin group to form a staple through the olefin group, Z olefin in the staple
  SITE 3: note = (S)-2-amino-4,4-dimethylpentanoic acid
  VARIANT 4: note = 2-amino-2-(pent-4-en-1-yl)hept-6-enoic acid, stapled with another amino acid residue comprising an olefin group to form a staple through one of the two olefin groups and with another amino acid residue comprising an olefin group to form a staple through the other of the two olefin groups, S configuration
  SITE 6: note = (S)-3-(2-amino-2-carboxyethyl)benzoic acid
  SITE 7: note = (S)-2-amino-6-(1H-1,2,3-triazol-1-yl)hexanoic acid, stapled with another amino acid residue to form a staple through the 4-position of the triazolyl group
  SITE 10: note = L-alanine, stapled with another amino acid residue comprising a triazolyl group to form a staple through the terminal methyl group
  SITE 11: note (S)-3-amino-1-((pent-4-en-1-yloxy)carbonyl)pyrrolidine-3-ca rboxylic acid, stapled with another amino acid residue comprising an olefin group to form a staple through the olefin group, E olefin in the staple
  SITE 12: note = (S)-2-amino-3-(thiophen-3-yl)propanoic acid
  SITE 13: note = (S)-2-amino-3-(benzo[b]thiophen-3-yl)propanoic acid
  SITE 14: note = C-term amino
XDXXDXXAFAXXXQ

SEQ ID NO: 1530 - protein, 14 aa, synthetic construct
  SITE 1: note = N-term Acetic Acid
  SITE 1: note = (R)-2-allylpyrrolidine-2-carboxylic acid, stapled with another amino acid residue comprising an olefin group to form a staple through the olefin group, E olefin in the staple
  SITE 3: note = (S)-2-amino-4,4-dimethylpentanoic acid
  VARIANT 4: note = 2-amino-2-(pent-4-en-1-yl)hept-6-enoic acid, stapled with another amino acid residue comprising an olefin group to form a staple through one of the two olefin groups and with another amino acid residue comprising an olefin group to form a staple through the other of the two olefin groups, R configuration
  SITE 6: note = (S)-3-(2-amino-2-carboxyethyl)benzoic acid
  SITE 7: note = (S)-2-amino-6-(1H-1,2,3-triazol-1-yl)hexanoic acid, stapled with another amino acid residue to form a staple through the 4-position of the triazolyl group
  SITE 10: note = L-alanine, stapled with another amino acid residue comprising a triazolyl group to form a staple through the terminal methyl group
  SITE 11: note (S)-3-amino-1-((pent-4-en-1-yloxy)carbonyl)pyrrolidine-3-ca rboxylic acid, stapled with another amino acid residue comprising an olefin group to form a staple through the olefin group, E olefin in the staple
  SITE 12: note = (S)-2-amino-3-(thiophen-3-yl)propanoic acid
  SITE 13: note = (S)-2-amino-3-(benzo[b]thiophen-3-yl)propanoic acid
  SITE 14: note = C-term amino
XDXXDXXAFAXXXQ

SEQ ID NO: 1531 - protein, 14 aa, synthetic construct
  SITE 1: note = N-term Acetic Acid
  SITE 1: note = (R)-2-allylpyrrolidine-2-carboxylic acid, stapled with another amino acid residue comprising an olefin group to form a staple through the olefin group, E olefin in the staple
  SITE 3: note = (S)-2-amino-4,4-dimethylpentanoic acid
  VARIANT 4: note = 2-amino-2-(pent-4-en-1-yl)hept-6-enoic acid, stapled with another amino acid residue comprising an olefin group to form a staple through one of the two olefin groups and with another amino acid residue comprising an olefin group to form a staple through the other of the two olefin groups, S configuration
  SITE 6: note = (S)-3-(2-amino-2-carboxyethyl)benzoic acid
  SITE 7: note = (S)-2-amino-6-(1H-1,2,3-triazol-1-yl)hexanoic acid, stapled with another amino acid residue to form a staple through the 4-position of the triazolyl group
  SITE 10: note = L-alanine, stapled with another amino acid residue comprising a triazolyl group to form a staple through the terminal methyl group
  SITE 11: note (S)-3-amino-1-((pent-4-en-1-yloxy)carbonyl)pyrrolidine-3-ca rboxylic acid, stapled with another amino acid residue comprising an olefin group to form a staple through the olefin group, E olefin in the staple
  SITE 12: note = (S)-2-amino-3-(thiophen-3-yl)propanoic acid
  SITE 13: note = (S)-2-amino-3-(benzo[b]thiophen-3-yl)propanoic acid
  SITE 14: note = C-term amino
XDXXDXXAFAXXXQ

SEQ ID NO: 1532 - protein, 14 aa, synthetic construct
  SITE 1: note = N-term Acetic Acid
  SITE 1: note = (R)-2-allylpyrrolidine-2-carboxylic acid, stapled with another amino acid residue comprising an olefin group to form a staple through the olefin group, E olefin in the staple
  SITE 3: note = (S)-2-amino-4,4-dimethylpentanoic acid
  VARIANT 4: note = 2-amino-2-(pent-4-en-1-yl)hept-6-enoic acid, stapled with another amino acid residue comprising an olefin group to form a staple through one of the two olefin groups and with another amino acid residue comprising an olefin group to form a staple through the other of the two olefin groups, R configuration
  SITE 6: note = (S)-3-(2-amino-2-carboxyethyl)benzoic acid
  SITE 10: note = L-lysine, stapled with another amino acid residue comprising a side chain acid group to form a staple through the 6-amino group
  SITE 11: note (S)-3-amino-1-((pent-4-en-1-yloxy)carbonyl)pyrrolidine-3-ca rboxylic acid, stapled with another amino acid residue comprising an olefin group to form a staple through the olefin group, E olefin in the staple
  SITE 12: note = (S)-2-amino-3-(thiophen-3-yl)propanoic acid
  SITE 13: note = (S)-2-amino-3-(benzo[b]thiophen-3-yl)propanoic acid
  SITE 14: note = L-glutamic acid, stapled with another amino acid residue comprising a side chain amino group to form a staple through the 4-carboxyl group
  SITE 14: note = C-term amino
XDXXDXAAFKXXXE

SEQ ID NO: 1533 - protein, 14 aa, synthetic construct
  SITE 1: note = N-term Acetic Acid
  SITE 1: note = (R)-2-allylpyrrolidine-2-carboxylic acid, stapled with another amino acid residue comprising an olefin group to form a staple through the olefin group, E olefin in the staple
  SITE 3: note = (S)-2-amino-4,4-dimethylpentanoic acid
  VARIANT 4: note = 2-amino-2-(pent-4-en-1-yl)hept-6-enoic acid, stapled with another amino acid residue comprising an olefin group to form a staple through one of the two olefin groups and with another amino acid residue comprising an olefin group to form a staple through the other of the two olefin groups, S configuration
  SITE 6: note = (S)-3-(2-amino-2-carboxyethyl)benzoic acid
  SITE 10: note = L-lysine, stapled with another amino acid residue comprising a side chain acid group to form a staple through the 6-amino group
  SITE 11: note (S)-3-amino-1-((pent-4-en-1-yloxy)carbonyl)pyrrolidine-3-ca rboxylic acid, stapled with another amino acid residue comprising an olefin group to form a staple through the olefin group, E olefin in the staple
  SITE 12: note = (S)-2-amino-3-(thiophen-3-yl)propanoic acid
  SITE 13: note = (S)-2-amino-3-(benzo[b]thiophen-3-yl)propanoic acid
  SITE 14: note = L-glutamic acid, stapled with another amino acid residue comprising a side chain amino group to form a staple through the 4-carboxyl group
  SITE 14: note = C-term amino
XDXXDXAAFKXXXE

SEQ ID NO: 1534 - protein, 14 aa, synthetic construct
  SITE 1: note = N-term Acetic Acid
  SITE 1: note = (R)-2-allylpyrrolidine-2-carboxylic acid, stapled with another amino acid residue comprising an olefin group to form a staple through the olefin group, Z olefin in the staple
  SITE 3: note = (S)-2-amino-4,4-dimethylpentanoic acid
  VARIANT 4: note = 2-amino-2-(pent-4-en-1-yl)hept-6-enoic acid, stapled with another amino acid residue comprising an olefin group to form a staple through one of the two olefin groups and with another amino acid residue comprising an olefin group to form a staple through the other of the two olefin groups, R configuration
  SITE 6: note = (S)-3-(2-amino-2-carboxyethyl)benzoic acid
  SITE 10: note = L-lysine, stapled with another amino acid residue comprising a side chain acid group to form a staple through the 6-amino group
  SITE 11: note (S)-3-amino-1-((pent-4-en-1-yloxy)carbonyl)pyrrolidine-3-ca rboxylic acid, stapled with another amino acid residue comprising an olefin group to form a staple through the olefin group, E olefin in the staple
  SITE 12: note = (S)-2-amino-3-(thiophen-3-yl)propanoic acid
  SITE 13: note = (S)-2-amino-3-(benzo[b]thiophen-3-yl)propanoic acid
  SITE 14: note = L-glutamic acid, stapled with another amino acid residue comprising a side chain amino group to form a staple through the 4-carboxyl group
  SITE 14: note = C-term amino
XDXXDXAAFKXXXE

SEQ ID NO: 1535 - protein, 14 aa, synthetic construct
  SITE 1: note = N-term Acetic Acid
  SITE 1: note = (R)-2-allylpyrrolidine-2-carboxylic acid, stapled with another amino acid residue comprising an olefin group to form a staple through the olefin group, Z olefin in the staple
  SITE 3: note = (S)-2-amino-4,4-dimethylpentanoic acid
  VARIANT 4: note = 2-amino-2-(pent-4-en-1-yl)hept-6-enoic acid, stapled with another amino acid residue comprising an olefin group to form a staple through one of the two olefin groups and with another amino acid residue comprising an olefin group to form a staple through the other of the two olefin groups, S configuration
  SITE 6: note = (S)-3-(2-amino-2-carboxyethyl)benzoic acid
  SITE 10: note = L-lysine, stapled with another amino acid residue comprising a side chain acid group to form a staple through the 6-amino group
  SITE 11: note (S)-3-amino-1-((pent-4-en-1-yloxy)carbonyl)pyrrolidine-3-ca rboxylic acid, stapled with another amino acid residue comprising an olefin group to form a staple through the olefin group, E olefin in the staple
  SITE 12: note = (S)-2-amino-3-(thiophen-3-yl)propanoic acid
  SITE 13: note = (S)-2-amino-3-(benzo[b]thiophen-3-yl)propanoic acid
  SITE 14: note = L-glutamic acid, stapled with another amino acid residue comprising a side chain amino group to form a staple through the 4-carboxyl group
  SITE 14: note = C-term amino
XDXXDXAAFKXXXE

SEQ ID NO: 1536 - protein, 14 aa, synthetic construct
  SITE 1: note = N-term Acetic Acid
  SITE 1: note = (R)-2-allylpyrrolidine-2-carboxylic acid, stapled with another amino acid residue comprising an olefin group to form a staple through the olefin group, Z olefin in the staple
  SITE 3: note = (S)-2-amino-4,4-dimethylpentanoic acid
  VARIANT 4: note = 2-amino-2-(pent-4-en-1-yl)hept-6-enoic acid, stapled with another amino acid residue comprising an olefin group to form a staple through one of the two olefin groups and with another amino acid residue comprising an olefin group to form a staple through the other of the two olefin groups, R configuration
  SITE 6: note = (S)-3-(2-amino-2-carboxyethyl)benzoic acid
  SITE 10: note = L-lysine, stapled with another amino acid residue comprising a side chain acid group to form a staple through the 6-amino group
  SITE 11: note (S)-3-amino-1-((pent-4-en-1-yloxy)carbonyl)pyrrolidine-3-ca rboxylic acid, stapled with another amino acid residue comprising an olefin group to form a staple through the olefin group, Z olefin in the staple
  SITE 12: note = (S)-2-amino-3-(thiophen-3-yl)propanoic acid
  SITE 13: note = (S)-2-amino-3-(benzo[b]thiophen-3-yl)propanoic acid
  SITE 14: note = L-glutamic acid, stapled with another amino acid residue comprising a side chain amino group to form a staple through the 4-carboxyl group
  SITE 14: note = C-term amino
XDXXDXAAFKXXXE

SEQ ID NO: 1537 - protein, 14 aa, synthetic construct
  SITE 1: note = N-term Acetic Acid
  SITE 1: note = (R)-2-allylpyrrolidine-2-carboxylic acid, stapled with another amino acid residue comprising an olefin group to form a staple through the olefin group, Z olefin in the staple
  SITE 3: note = (S)-2-amino-4,4-dimethylpentanoic acid
  VARIANT 4: note = 2-amino-2-(pent-4-en-1-yl)hept-6-enoic acid, stapled with another amino acid residue comprising an olefin group to form a staple through one of the two olefin groups and with another amino acid residue comprising an olefin group to form a staple through the other of the two olefin groups, S configuration
  SITE 6: note = (S)-3-(2-amino-2-carboxyethyl)benzoic acid
  SITE 10: note = L-lysine, stapled with another amino acid residue comprising a side chain acid group to form a staple through the 6-amino group
  SITE 11: note (S)-3-amino-1-((pent-4-en-1-yloxy)carbonyl)pyrrolidine-3-ca rboxylic acid, stapled with another amino acid residue comprising an olefin group to form a staple through the olefin group, Z olefin in the staple
  SITE 12: note = (S)-2-amino-3-(thiophen-3-yl)propanoic acid
  SITE 13: note = (S)-2-amino-3-(benzo[b]thiophen-3-yl)propanoic acid
  SITE 14: note = L-glutamic acid, stapled with another amino acid residue comprising a side chain amino group to form a staple through the 4-carboxyl group
  SITE 14: note = C-term amino
XDXXDXAAFKXXXE

SEQ ID NO: 1538 - protein, 14 aa, synthetic construct
  SITE 1: note = N-term Acetic Acid
  SITE 1: note = (R)-2-allylpyrrolidine-2-carboxylic acid, stapled with another amino acid residue comprising an olefin group to form a staple through the olefin group, E olefin in the staple
  SITE 3: note = (S)-2-amino-4,4-dimethylpentanoic acid
  VARIANT 4: note = 2-amino-2-(pent-4-en-1-yl)hept-6-enoic acid, stapled with another amino acid residue comprising an olefin group to form a staple through one of the two olefin groups and with another amino acid residue comprising an olefin group to form a staple through the other of the two olefin groups, R configuration
  SITE 6: note = (S)-3-(2-amino-2-carboxyethyl)benzoic acid
  SITE 10: note = L-lysine, stapled with another amino acid residue comprising a side chain acid group to form a staple through the 6-amino group
  SITE 11: note (S)-3-amino-1-((pent-4-en-1-yloxy)carbonyl)pyrrolidine-3-ca rboxylic acid, stapled with another amino acid residue comprising an olefin group to form a staple through the olefin group, Z olefin in the staple
  SITE 12: note = (S)-2-amino-3-(thiophen-3-yl)propanoic acid
  SITE 13: note = (S)-2-amino-3-(benzo[b]thiophen-3-yl)propanoic acid
  SITE 14: note = L-glutamic acid, stapled with another amino acid residue comprising a side chain amino group to form a staple through the 4-carboxyl group
  SITE 14: note = C-term amino
XDXXDXAAFKXXXE

SEQ ID NO: 1539 - protein, 14 aa, synthetic construct
  SITE 1: note = N-term Acetic Acid
  SITE 1: note = (R)-2-allylpyrrolidine-2-carboxylic acid, stapled with another amino acid residue comprising an olefin group to form a staple through the olefin group, E olefin in the staple
  SITE 3: note = (S)-2-amino-4,4-dimethylpentanoic acid
  VARIANT 4: note = 2-amino-2-(pent-4-en-1-yl)hept-6-enoic acid, stapled with another amino acid residue comprising an olefin group to form a staple through one of the two olefin groups and with another amino acid residue comprising an olefin group to form a staple through the other of the two olefin groups, S configuration
  SITE 6: note = (S)-3-(2-amino-2-carboxyethyl)benzoic acid
  SITE 10: note = L-lysine, stapled with another amino acid residue comprising a side chain acid group to form a staple through the 6-amino group
  SITE 11: note (S)-3-amino-1-((pent-4-en-1-yloxy)carbonyl)pyrrolidine-3-ca rboxylic acid, stapled with another amino acid residue comprising an olefin group to form a staple through the olefin group, Z olefin in the staple
  SITE 12: note = (S)-2-amino-3-(thiophen-3-yl)propanoic acid
  SITE 13: note = (S)-2-amino-3-(benzo[b]thiophen-3-yl)propanoic acid
  SITE 14: note = L-glutamic acid, stapled with another amino acid residue comprising a side chain amino group to form a staple through the 4-carboxyl group
  SITE 14: note = C-term amino
XDXXDXAAFKXXXE

SEQ ID NO: 1540 - protein, 15 aa, synthetic construct
  SITE 1: note = N-term Acetic Acid
  SITE 1: note = (R)-2-allylpyrrolidine-2-carboxylic acid, stapled with another amino acid residue comprising an olefin group to form a staple through the olefin group, E olefin in the staple
  SITE 3: note = (S)-2-amino-4,4-dimethylpentanoic acid
  VARIANT 4: note = 2-amino-2-(pent-4-en-1-yl)hept-6-enoic acid, stapled with another amino acid residue comprising an olefin group to form a staple through one of the two olefin groups and with another amino acid residue comprising an olefin group to form a staple through the other of the two olefin groups, R configuration
  SITE 6: note = (S)-3-(2-amino-2-carboxyethyl)benzoic acid
  SITE 7: note = 2-amino-2-methylpropanoic acid
  SITE 10: note = L-lysine, stapled with another amino acid residue comprising a side chain acid group to form a staple through the 6-amino group
  SITE 11: note (S)-3-amino-1-((pent-4-en-1-yloxy)carbonyl)pyrrolidine-3-ca rboxylic acid, stapled with another amino acid residue comprising an olefin group to form a staple through the olefin group, E olefin in the staple
  SITE 12: note = (S)-2-amino-3-(thiophen-3-yl)propanoic acid
  SITE 13: note = (S)-2-amino-3-(benzo[b]thiophen-3-yl)propanoic acid
  SITE 14: note = L-glutamic acid, stapled with another amino acid residue comprising a side chain amino group to form a staple through the 4-carboxyl group
  SITE 15: note = C-term amino
XDXXDXXAFKXXXEA

SEQ ID NO: 1541 - protein, 15 aa, synthetic construct
  SITE 1: note = N-term Acetic Acid
  SITE 1: note = (R)-2-allylpyrrolidine-2-carboxylic acid, stapled with another amino acid residue comprising an olefin group to form a staple through the olefin group, E olefin in the staple
  SITE 3: note = (S)-2-amino-4,4-dimethylpentanoic acid
  VARIANT 4: note = 2-amino-2-(pent-4-en-1-yl)hept-6-enoic acid, stapled with another amino acid residue comprising an olefin group to form a staple through one of the two olefin groups and with another amino acid residue comprising an olefin group to form a staple through the other of the two olefin groups, S configuration
  SITE 6: note = (S)-3-(2-amino-2-carboxyethyl)benzoic acid
  SITE 7: note = 2-amino-2-methylpropanoic acid
  SITE 10: note = L-lysine, stapled with another amino acid residue comprising a side chain acid group to form a staple through the 6-amino group
  SITE 11: note (S)-3-amino-1-((pent-4-en-1-yloxy)carbonyl)pyrrolidine-3-ca rboxylic acid, stapled with another amino acid residue comprising an olefin group to form a staple through the olefin group, E olefin in the staple
  SITE 12: note = (S)-2-amino-3-(thiophen-3-yl)propanoic acid
  SITE 13: note = (S)-2-amino-3-(benzo[b]thiophen-3-yl)propanoic acid
  SITE 14: note = L-glutamic acid, stapled with another amino acid residue comprising a side chain amino group to form a staple through the 4-carboxyl group
  SITE 15: note = C-term amino
XDXXDXXAFKXXXEA

SEQ ID NO: 1542 - protein, 15 aa, synthetic construct
  SITE 1: note = N-term Acetic Acid
  SITE 1: note = (R)-2-allylpyrrolidine-2-carboxylic acid, stapled with another amino acid residue comprising an olefin group to form a staple through the olefin group, Z olefin in the staple
  SITE 3: note = (S)-2-amino-4,4-dimethylpentanoic acid
  VARIANT 4: note = 2-amino-2-(pent-4-en-1-yl)hept-6-enoic acid, stapled with another amino acid residue comprising an olefin group to form a staple through one of the two olefin groups and with another amino acid residue comprising an olefin group to form a staple through the other of the two olefin groups, R configuration
  SITE 6: note = (S)-3-(2-amino-2-carboxyethyl)benzoic acid
  SITE 7: note = 2-amino-2-methylpropanoic acid
  SITE 10: note = L-lysine, stapled with another amino acid residue comprising a side chain acid group to form a staple through the 6-amino group
  SITE 11: note (S)-3-amino-1-((pent-4-en-1-yloxy)carbonyl)pyrrolidine-3-ca rboxylic acid, stapled with another amino acid residue comprising an olefin group to form a staple through the olefin group, E olefin in the staple
  SITE 12: note = (S)-2-amino-3-(thiophen-3-yl)propanoic acid
  SITE 13: note = (S)-2-amino-3-(benzo[b]thiophen-3-yl)propanoic acid
  SITE 14: note = L-glutamic acid, stapled with another amino acid residue comprising a side chain amino group to form a staple through the 4-carboxyl group
  SITE 15: note = C-term amino
XDXXDXXAFKXXXEA

SEQ ID NO: 1543 - protein, 15 aa, synthetic construct
  SITE 1: note = N-term Acetic Acid
  SITE 1: note = (R)-2-allylpyrrolidine-2-carboxylic acid, stapled with another amino acid residue comprising an olefin group to form a staple through the olefin group, Z olefin in the staple
  SITE 3: note = (S)-2-amino-4,4-dimethylpentanoic acid
  VARIANT 4: note = 2-amino-2-(pent-4-en-1-yl)hept-6-enoic acid, stapled with another amino acid residue comprising an olefin group to form a staple through one of the two olefin groups and with another amino acid residue comprising an olefin group to form a staple through the other of the two olefin groups, S configuration
  SITE 6: note = (S)-3-(2-amino-2-carboxyethyl)benzoic acid
  SITE 7: note = 2-amino-2-methylpropanoic acid
  SITE 10: note = L-lysine, stapled with another amino acid residue comprising a side chain acid group to form a staple through the 6-amino group
  SITE 11: note (S)-3-amino-1-((pent-4-en-1-yloxy)carbonyl)pyrrolidine-3-ca rboxylic acid, stapled with another amino acid residue comprising an olefin group to form a staple through the olefin group, E olefin in the staple
  SITE 12: note = (S)-2-amino-3-(thiophen-3-yl)propanoic acid
  SITE 13: note = (S)-2-amino-3-(benzo[b]thiophen-3-yl)propanoic acid
  SITE 14: note = L-glutamic acid, stapled with another amino acid residue comprising a side chain amino group to form a staple through the 4-carboxyl group
  SITE 15: note = C-term amino
XDXXDXXAFKXXXEA

SEQ ID NO: 1544 - protein, 15 aa, synthetic construct
  SITE 1: note = N-term Acetic Acid
  SITE 1: note = (R)-2-allylpyrrolidine-2-carboxylic acid, stapled with another amino acid residue comprising an olefin group to form a staple through the olefin group, Z olefin in the staple
  SITE 3: note = (S)-2-amino-4,4-dimethylpentanoic acid
  VARIANT 4: note = 2-amino-2-(pent-4-en-1-yl)hept-6-enoic acid, stapled with another amino acid residue comprising an olefin group to form a staple through one of the two olefin groups and with another amino acid residue comprising an olefin group to form a staple through the other of the two olefin groups, R configuration
  SITE 6: note = (S)-3-(2-amino-2-carboxyethyl)benzoic acid
  SITE 7: note = 2-amino-2-methylpropanoic acid
  SITE 10: note = L-lysine, stapled with another amino acid residue comprising a side chain acid group to form a staple through the 6-amino group
  SITE 11: note (S)-3-amino-1-((pent-4-en-1-yloxy)carbonyl)pyrrolidine-3-ca rboxylic acid, stapled with another amino acid residue comprising an olefin group to form a staple through the olefin group, Z olefin in the staple
  SITE 12: note = (S)-2-amino-3-(thiophen-3-yl)propanoic acid
  SITE 13: note = (S)-2-amino-3-(benzo[b]thiophen-3-yl)propanoic acid
  SITE 14: note = L-glutamic acid, stapled with another amino acid residue comprising a side chain amino group to form a staple through the 4-carboxyl group
  SITE 15: note = C-term amino
XDXXDXXAFKXXXEA

SEQ ID NO: 1545 - protein, 15 aa, synthetic construct
  SITE 1: note = N-term Acetic Acid
  SITE 1: note = (R)-2-allylpyrrolidine-2-carboxylic acid, stapled with another amino acid residue comprising an olefin group to form a staple through the olefin group, Z olefin in the staple
  SITE 3: note = (S)-2-amino-4,4-dimethylpentanoic acid
  VARIANT 4: note = 2-amino-2-(pent-4-en-1-yl)hept-6-enoic acid, stapled with another amino acid residue comprising an olefin group to form a staple through one of the two olefin groups and with another amino acid residue comprising an olefin group to form a staple through the other of the two olefin groups, S configuration
  SITE 6: note = (S)-3-(2-amino-2-carboxyethyl)benzoic acid
  SITE 7: note = 2-amino-2-methylpropanoic acid
  SITE 10: note = L-lysine, stapled with another amino acid residue comprising a side chain acid group to form a staple through the 6-amino group
  SITE 11: note (S)-3-amino-1-((pent-4-en-1-yloxy)carbonyl)pyrrolidine-3-ca rboxylic acid, stapled with another amino acid residue comprising an olefin group to form a staple through the olefin group, Z olefin in the staple
  SITE 12: note = (S)-2-amino-3-(thiophen-3-yl)propanoic acid
  SITE 13: note = (S)-2-amino-3-(benzo[b]thiophen-3-yl)propanoic acid
  SITE 14: note = L-glutamic acid, stapled with another amino acid residue comprising a side chain amino group to form a staple through the 4-carboxyl group
  SITE 15: note = C-term amino
XDXXDXXAFKXXXEA

SEQ ID NO: 1546 - protein, 15 aa, synthetic construct
  SITE 1: note = N-term Acetic Acid
  SITE 1: note = (R)-2-allylpyrrolidine-2-carboxylic acid, stapled with another amino acid residue comprising an olefin group to form a staple through the olefin group, E olefin in the staple
  SITE 3: note = (S)-2-amino-4,4-dimethylpentanoic acid
  VARIANT 4: note = 2-amino-2-(pent-4-en-1-yl)hept-6-enoic acid, stapled with another amino acid residue comprising an olefin group to form a staple through one of the two olefin groups and with another amino acid residue comprising an olefin group to form a staple through the other of the two olefin groups, R configuration
  SITE 6: note = (S)-3-(2-amino-2-carboxyethyl)benzoic acid
  SITE 7: note = 2-amino-2-methylpropanoic acid
  SITE 10: note = L-lysine, stapled with another amino acid residue comprising a side chain acid group to form a staple through the 6-amino group
  SITE 11: note (S)-3-amino-1-((pent-4-en-1-yloxy)carbonyl)pyrrolidine-3-ca rboxylic acid, stapled with another amino acid residue comprising an olefin group to form a staple through the olefin group, Z olefin in the staple
  SITE 12: note = (S)-2-amino-3-(thiophen-3-yl)propanoic acid
  SITE 13: note = (S)-2-amino-3-(benzo[b]thiophen-3-yl)propanoic acid
  SITE 14: note = L-glutamic acid, stapled with another amino acid residue comprising a side chain amino group to form a staple through the 4-carboxyl group
  SITE 15: note = C-term amino
XDXXDXXAFKXXXEA

SEQ ID NO: 1547 - protein, 15 aa, synthetic construct
  SITE 1: note = N-term Acetic Acid
  SITE 1: note = (R)-2-allylpyrrolidine-2-carboxylic acid, stapled with another amino acid residue comprising an olefin group to form a staple through the olefin group, E olefin in the staple
  SITE 3: note = (S)-2-amino-4,4-dimethylpentanoic acid
  VARIANT 4: note = 2-amino-2-(pent-4-en-1-yl)hept-6-enoic acid, stapled with another amino acid residue comprising an olefin group to form a staple through one of the two olefin groups and with another amino acid residue comprising an olefin group to form a staple through the other of the two olefin groups, S configuration
  SITE 6: note = (S)-3-(2-amino-2-carboxyethyl)benzoic acid
  SITE 7: note = 2-amino-2-methylpropanoic acid
  SITE 10: note = L-lysine, stapled with another amino acid residue comprising a side chain acid group to form a staple through the 6-amino group
  SITE 11: note (S)-3-amino-1-((pent-4-en-1-yloxy)carbonyl)pyrrolidine-3-ca rboxylic acid, stapled with another amino acid residue comprising an olefin group to form a staple through the olefin group, Z olefin in the staple
  SITE 12: note = (S)-2-amino-3-(thiophen-3-yl)propanoic acid
  SITE 13: note = (S)-2-amino-3-(benzo[b]thiophen-3-yl)propanoic acid
  SITE 14: note = L-glutamic acid, stapled with another amino acid residue comprising a side chain amino group to form a staple through the 4-carboxyl group
  SITE 15: note = C-term amino
XDXXDXXAFKXXXEA

SEQ ID NO: 1548 - protein, 15 aa, synthetic construct
  SITE 1: note = N-term Acetic Acid
  SITE 1: note = (R)-2-allylpyrrolidine-2-carboxylic acid, stapled with another amino acid residue comprising an olefin group to form a staple through the olefin group
  SITE 3: note = (S)-2-amino-4,4-dimethylpentanoic acid
  VARIANT 4: note = 2-amino-2-(pent-4-en-1-yl)hept-6-enoic acid, stapled with another amino acid residue comprising an olefin group to form a staple through one of the two olefin groups and with another amino acid residue comprising an olefin group to form a staple through the other of the two olefin groups, S configuration
  SITE 6: note = (S)-3-(2-amino-2-carboxyethyl)benzoic acid
  SITE 7: note = 2-amino-2-methylpropanoic acid
  SITE 10: note = L-lysine, stapled with another amino acid residue comprising a side chain acid group to form a staple through the 6-amino group
  SITE 11: note (S)-3-amino-1-((pent-4-en-1-yloxy)carbonyl)pyrrolidine-3-ca rboxylic acid, stapled with another amino acid residue comprising an olefin group to form a staple through the olefin group
  SITE 12: note = (S)-2-amino-3-(thiophen-3-yl)propanoic acid
  SITE 13: note = (S)-2-amino-3-(benzo[b]thiophen-3-yl)propanoic acid
  SITE 14: note = L-glutamic acid, stapled with another amino acid residue comprising a side chain amino group to form a staple through the 4-carboxyl group
  SITE 15: note = C-term amino
XDXXDXXAFKXXXEA

SEQ ID NO: 1549 - protein, 15 aa, synthetic construct
  SITE 1: note = N-term Acetic Acid
  SITE 1: note = (R)-2-allylpyrrolidine-2-carboxylic acid, stapled with another amino acid residue comprising an olefin group to form a staple through the olefin group, Z olefin in the staple
  SITE 3: note = (S)-2-amino-4,4-dimethylpentanoic acid
  VARIANT 4: note = 2-amino-2-(pent-4-en-1-yl)hept-6-enoic acid, stapled with another amino acid residue comprising an olefin group to form a staple through one of the two olefin groups and with another amino acid residue comprising an olefin group to form a staple through the other of the two olefin groups, S configuration
  SITE 6: note = (S)-3-(2-amino-2-carboxyethyl)benzoic acid
  SITE 7: note = 2-amino-2-methylpropanoic acid
  SITE 10: note = L-lysine, stapled with another amino acid residue comprising a side chain acid group to form a staple through the 6-amino group
  SITE 11: note (S)-3-amino-1-((pent-4-en-1-yloxy)carbonyl)pyrrolidine-3-ca rboxylic acid, stapled with another amino acid residue comprising an olefin group to form a staple through the olefin group
  SITE 12: note = (S)-2-amino-3-(thiophen-3-yl)propanoic acid
  SITE 13: note = (S)-2-amino-3-(benzo[b]thiophen-3-yl)propanoic acid
  SITE 14: note = L-glutamic acid, stapled with another amino acid residue comprising a side chain amino group to form a staple through the 4-carboxyl group
  SITE 15: note = C-term amino
XDXXDXXAFKXXXEA

SEQ ID NO: 1550 - protein, 15 aa, synthetic construct
  SITE 1: note = N-term Acetic Acid
  SITE 1: note = (R)-2-allylpyrrolidine-2-carboxylic acid, stapled with another amino acid residue comprising an olefin group to form a staple through the olefin group, E olefin in the staple
  SITE 3: note = (S)-2-amino-4,4-dimethylpentanoic acid
  VARIANT 4: note = 2-amino-2-(pent-4-en-1-yl)hept-6-enoic acid, stapled with another amino acid residue comprising an olefin group to form a staple through one of the two olefin groups and with another amino acid residue comprising an olefin group to form a staple through the other of the two olefin groups, R configuration
  SITE 6: note = (S)-3-(2-amino-2-carboxyethyl)benzoic acid
  SITE 7: note = 2-amino-2-methylpropanoic acid
  SITE 10: note = L-lysine, stapled with another amino acid residue comprising a side chain acid group to form a staple through the 6-amino group
  SITE 11: note (S)-3-amino-1-((pent-4-en-1-yloxy)carbonyl)pyrrolidine-3-ca rboxylic acid, stapled with another amino acid residue comprising an olefin group to form a staple through the olefin group, E olefin in the staple
  SITE 12: note = (S)-2-amino-3-(2-(trifluoromethyl)phenyl)propanoic acid
  SITE 13: note = (S)-2-amino-3-(benzo[b]thiophen-3-yl)propanoic acid
  SITE 14: note = L-glutamic acid, stapled with another amino acid residue comprising a side chain amino group to form a staple through the 4-carboxyl group
  SITE 15: note = C-term amino
XDXXDXXAFKXXXEA

SEQ ID NO: 1551 - protein, 15 aa, synthetic construct
  SITE 1: note = N-term Acetic Acid
  SITE 1: note = (R)-2-allylpyrrolidine-2-carboxylic acid, stapled with another amino acid residue comprising an olefin group to form a staple through the olefin group, E olefin in the staple
  SITE 3: note = (S)-2-amino-4,4-dimethylpentanoic acid
  VARIANT 4: note = 2-amino-2-(pent-4-en-1-yl)hept-6-enoic acid, stapled with another amino acid residue comprising an olefin group to form a staple through one of the two olefin groups and with another amino acid residue comprising an olefin group to form a staple through the other of the two olefin groups, S configuration
  SITE 6: note = (S)-3-(2-amino-2-carboxyethyl)benzoic acid
  SITE 7: note = 2-amino-2-methylpropanoic acid
  SITE 10: note = L-lysine, stapled with another amino acid residue comprising a side chain acid group to form a staple through the 6-amino group
  SITE 11: note (S)-3-amino-1-((pent-4-en-1-yloxy)carbonyl)pyrrolidine-3-ca rboxylic acid, stapled with another amino acid residue comprising an olefin group to form a staple through the olefin group, E olefin in the staple
  SITE 12: note = (S)-2-amino-3-(2-(trifluoromethyl)phenyl)propanoic acid
  SITE 13: note = (S)-2-amino-3-(benzo[b]thiophen-3-yl)propanoic acid
  SITE 14: note = L-glutamic acid, stapled with another amino acid residue comprising a side chain amino group to form a staple through the 4-carboxyl group
  SITE 15: note = C-term amino
XDXXDXXAFKXXXEA

SEQ ID NO: 1552 - protein, 15 aa, synthetic construct
  SITE 1: note = N-term Acetic Acid
  SITE 1: note = (R)-2-allylpyrrolidine-2-carboxylic acid, stapled with another amino acid residue comprising an olefin group to form a staple through the olefin group, Z olefin in the staple
  SITE 3: note = (S)-2-amino-4,4-dimethylpentanoic acid
  VARIANT 4: note = 2-amino-2-(pent-4-en-1-yl)hept-6-enoic acid, stapled with another amino acid residue comprising an olefin group to form a staple through one of the two olefin groups and with another amino acid residue comprising an olefin group to form a staple through the other of the two olefin groups, R configuration
  SITE 6: note = (S)-3-(2-amino-2-carboxyethyl)benzoic acid
  SITE 7: note = 2-amino-2-methylpropanoic acid
  SITE 10: note = L-lysine, stapled with another amino acid residue comprising a side chain acid group to form a staple through the 6-amino group
  SITE 11: note (S)-3-amino-1-((pent-4-en-1-yloxy)carbonyl)pyrrolidine-3-ca rboxylic acid, stapled with another amino acid residue comprising an olefin group to form a staple through the olefin group, E olefin in the staple
  SITE 12: note = (S)-2-amino-3-(2-(trifluoromethyl)phenyl)propanoic acid
  SITE 13: note = (S)-2-amino-3-(benzo[b]thiophen-3-yl)propanoic acid
  SITE 14: note = L-glutamic acid, stapled with another amino acid residue comprising a side chain amino group to form a staple through the 4-carboxyl group
  SITE 15: note = C-term amino
XDXXDXXAFKXXXEA

SEQ ID NO: 1553 - protein, 15 aa, synthetic construct
  SITE 1: note = N-term Acetic Acid
  SITE 1: note = (R)-2-allylpyrrolidine-2-carboxylic acid, stapled with another amino acid residue comprising an olefin group to form a staple through the olefin group, Z olefin in the staple
  SITE 3: note = (S)-2-amino-4,4-dimethylpentanoic acid
  VARIANT 4: note = 2-amino-2-(pent-4-en-1-yl)hept-6-enoic acid, stapled with another amino acid residue comprising an olefin group to form a staple through one of the two olefin groups and with another amino acid residue comprising an olefin group to form a staple through the other of the two olefin groups, S configuration
  SITE 6: note = (S)-3-(2-amino-2-carboxyethyl)benzoic acid
  SITE 7: note = 2-amino-2-methylpropanoic acid
  SITE 10: note = L-lysine, stapled with another amino acid residue comprising a side chain acid group to form a staple through the 6-amino group
  SITE 11: note (S)-3-amino-1-((pent-4-en-1-yloxy)carbonyl)pyrrolidine-3-ca rboxylic acid, stapled with another amino acid residue comprising an olefin group to form a staple through the olefin group, E olefin in the staple
  SITE 12: note = (S)-2-amino-3-(2-(trifluoromethyl)phenyl)propanoic acid
  SITE 13: note = (S)-2-amino-3-(benzo[b]thiophen-3-yl)propanoic acid
  SITE 14: note = L-glutamic acid, stapled with another amino acid residue comprising a side chain amino group to form a staple through the 4-carboxyl group
  SITE 15: note = C-term amino
XDXXDXXAFKXXXEA

SEQ ID NO: 1554 - protein, 15 aa, synthetic construct
  SITE 1: note = N-term Acetic Acid
  SITE 1: note = (R)-2-allylpyrrolidine-2-carboxylic acid, stapled with another amino acid residue comprising an olefin group to form a staple through the olefin group, Z olefin in the staple
  SITE 3: note = (S)-2-amino-4,4-dimethylpentanoic acid
  VARIANT 4: note = 2-amino-2-(pent-4-en-1-yl)hept-6-enoic acid, stapled with another amino acid residue comprising an olefin group to form a staple through one of the two olefin groups and with another amino acid residue comprising an olefin group to form a staple through the other of the two olefin groups, R configuration
  SITE 6: note = (S)-3-(2-amino-2-carboxyethyl)benzoic acid
  SITE 7: note = 2-amino-2-methylpropanoic acid
  SITE 10: note = L-lysine, stapled with another amino acid residue comprising a side chain acid group to form a staple through the 6-amino group
  SITE 11: note (S)-3-amino-1-((pent-4-en-1-yloxy)carbonyl)pyrrolidine-3-ca rboxylic acid, stapled with another amino acid residue comprising an olefin group to form a staple through the olefin group, Z olefin in the staple
  SITE 12: note = (S)-2-amino-3-(2-(trifluoromethyl)phenyl)propanoic acid
  SITE 13: note = (S)-2-amino-3-(benzo[b]thiophen-3-yl)propanoic acid
  SITE 14: note = L-glutamic acid, stapled with another amino acid residue comprising a side chain amino group to form a staple through the 4-carboxyl group
  SITE 15: note = C-term amino
XDXXDXXAFKXXXEA

SEQ ID NO: 1555 - protein, 15 aa, synthetic construct
  SITE 1: note = N-term Acetic Acid
  SITE 1: note = (R)-2-allylpyrrolidine-2-carboxylic acid, stapled with another amino acid residue comprising an olefin group to form a staple through the olefin group, Z olefin in the staple
  SITE 3: note = (S)-2-amino-4,4-dimethylpentanoic acid
  VARIANT 4: note = 2-amino-2-(pent-4-en-1-yl)hept-6-enoic acid, stapled with another amino acid residue comprising an olefin group to form a staple through one of the two olefin groups and with another amino acid residue comprising an olefin group to form a staple through the other of the two olefin groups, S configuration
  SITE 6: note = (S)-3-(2-amino-2-carboxyethyl)benzoic acid
  SITE 7: note = 2-amino-2-methylpropanoic acid
  SITE 10: note = L-lysine, stapled with another amino acid residue comprising a side chain acid group to form a staple through the 6-amino group
  SITE 11: note (S)-3-amino-1-((pent-4-en-1-yloxy)carbonyl)pyrrolidine-3-ca rboxylic acid, stapled with another amino acid residue comprising an olefin group to form a staple through the olefin group, Z olefin in the staple
  SITE 12: note = (S)-2-amino-3-(2-(trifluoromethyl)phenyl)propanoic acid
  SITE 13: note = (S)-2-amino-3-(benzo[b]thiophen-3-yl)propanoic acid
  SITE 14: note = L-glutamic acid, stapled with another amino acid residue comprising a side chain amino group to form a staple through the 4-carboxyl group
  SITE 15: note = C-term amino
XDXXDXXAFKXXXEA

SEQ ID NO: 1556 - protein, 15 aa, synthetic construct
  SITE 1: note = N-term Acetic Acid
  SITE 1: note = (R)-2-allylpyrrolidine-2-carboxylic acid, stapled with another amino acid residue comprising an olefin group to form a staple through the olefin group, E olefin in the staple
  SITE 3: note = (S)-2-amino-4,4-dimethylpentanoic acid
  VARIANT 4: note = 2-amino-2-(pent-4-en-1-yl)hept-6-enoic acid, stapled with another amino acid residue comprising an olefin group to form a staple through one of the two olefin groups and with another amino acid residue comprising an olefin group to form a staple through the other of the two olefin groups, R configuration
  SITE 6: note = (S)-3-(2-amino-2-carboxyethyl)benzoic acid
  SITE 7: note = 2-amino-2-methylpropanoic acid
  SITE 10: note = L-lysine, stapled with another amino acid residue comprising a side chain acid group to form a staple through the 6-amino group
  SITE 11: note (S)-3-amino-1-((pent-4-en-1-yloxy)carbonyl)pyrrolidine-3-ca rboxylic acid, stapled with another amino acid residue comprising an olefin group to form a staple through the olefin group, Z olefin in the staple
  SITE 12: note = (S)-2-amino-3-(2-(trifluoromethyl)phenyl)propanoic acid
  SITE 13: note = (S)-2-amino-3-(benzo[b]thiophen-3-yl)propanoic acid
  SITE 14: note = L-glutamic acid, stapled with another amino acid residue comprising a side chain amino group to form a staple through the 4-carboxyl group
  SITE 15: note = C-term amino
XDXXDXXAFKXXXEA

SEQ ID NO: 1557 - protein, 15 aa, synthetic construct
  SITE 1: note = N-term Acetic Acid
  SITE 1: note = (R)-2-allylpyrrolidine-2-carboxylic acid, stapled with another amino acid residue comprising an olefin group to form a staple through the olefin group, E olefin in the staple
  SITE 3: note = (S)-2-amino-4,4-dimethylpentanoic acid
  VARIANT 4: note = 2-amino-2-(pent-4-en-1-yl)hept-6-enoic acid, stapled with another amino acid residue comprising an olefin group to form a staple through one of the two olefin groups and with another amino acid residue comprising an olefin group to form a staple through the other of the two olefin groups, S configuration
  SITE 6: note = (S)-3-(2-amino-2-carboxyethyl)benzoic acid
  SITE 7: note = 2-amino-2-methylpropanoic acid
  SITE 10: note = L-lysine, stapled with another amino acid residue comprising a side chain acid group to form a staple through the 6-amino group
  SITE 11: note (S)-3-amino-1-((pent-4-en-1-yloxy)carbonyl)pyrrolidine-3-ca rboxylic acid, stapled with another amino acid residue comprising an olefin group to form a staple through the olefin group, Z olefin in the staple
  SITE 12: note = (S)-2-amino-3-(2-(trifluoromethyl)phenyl)propanoic acid
  SITE 13: note = (S)-2-amino-3-(benzo[b]thiophen-3-yl)propanoic acid
  SITE 14: note = L-glutamic acid, stapled with another amino acid residue comprising a side chain amino group to form a staple through the 4-carboxyl group
  SITE 15: note = C-term amino
XDXXDXXAFKXXXEA

SEQ ID NO: 1558 - protein, 15 aa, synthetic construct
  SITE 1: note = N-term Acetic Acid
  SITE 1: note = (R)-2-allylpyrrolidine-2-carboxylic acid, stapled with another amino acid residue comprising an olefin group to form a staple through the olefin group, olefin in staple converted to bivalent 1,2-ethylene
  SITE 3: note = L-glutamic acid, stapled with another amino acid residue comprising a side chain amino group to form a staple through the 4-carboxyl group
  VARIANT 4: note = 2-amino-2-(pent-4-en-1-yl)hept-6-enoic acid, stapled with another amino acid residue comprising an olefin group to form a staple through one of the two olefin groups and with another amino acid residue comprising an olefin group to form a staple through the other of the two olefin groups, olefin in each staple converted to bivalent 1,2-ethylene
  SITE 6: note = (S)-3-(2-amino-2-carboxyethyl)benzoic acid
  SITE 7: note = L-lysine, stapled with another amino acid residue comprising a side chain acid group to form a staple through the 6-amino group
  SITE 10: note = L-lysine, stapled with another amino acid residue comprising a side chain acid group to form a staple through the 6-amino group
  SITE 11: note (S)-3-amino-1-((pent-4-en-1-yloxy)carbonyl)pyrrolidine-3-ca rboxylic acid, stapled with another amino acid residue comprising an olefin group to form a staple through the olefin group, olefin in staple converted to bivalent 1,2-ethylene
  SITE 12: note = (S)-2-amino-3-(2-(trifluoromethyl)phenyl)propanoic acid
  SITE 13: note = (S)-2-amino-3-(benzo[b]thiophen-3-yl)propanoic acid
  SITE 14: note = L-glutamic acid, stapled with another amino acid residue comprising a side chain amino group to form a staple through the 4-carboxyl group
  SITE 15: note = C-term amino
XDEXDXKAFKXXXEA

SEQ ID NO: 1559 - protein, 15 aa, synthetic construct
  SITE 1: note = N-term Acetic Acid
  SITE 1: note = (R)-2-allylpyrrolidine-2-carboxylic acid, stapled with another amino acid residue comprising an olefin group to form a staple through the olefin group, olefin in staple converted to bivalent 1,2-ethylene
  SITE 3: note = L-glutamic acid, stapled with another amino acid residue comprising a side chain amino group to form a staple through the 4-carboxyl group
  VARIANT 4: note = 2-amino-2-(pent-4-en-1-yl)hept-6-enoic acid, stapled with another amino acid residue comprising an olefin group to form a staple through one of the two olefin groups and with another amino acid residue comprising an olefin group to form a staple through the other of the two olefin groups, olefin in each staple converted to bivalent 1,2-ethylene, R configuration
  SITE 6: note = (S)-3-(2-amino-2-carboxyethyl)benzoic acid
  SITE 7: note = L-lysine, stapled with another amino acid residue comprising a side chain acid group to form a staple through the 6-amino group
  SITE 10: note = L-lysine, stapled with another amino acid residue comprising a side chain acid group to form a staple through the 6-amino group
  SITE 11: note (S)-3-amino-1-((pent-4-en-1-yloxy)carbonyl)pyrrolidine-3-ca rboxylic acid, stapled with another amino acid residue comprising an olefin group to form a staple through the olefin group, olefin in staple converted to bivalent 1,2-ethylene
  SITE 12: note = (S)-2-amino-3-(thiophen-3-yl)propanoic acid
  SITE 13: note = (S)-2-amino-3-(benzo[b]thiophen-3-yl)propanoic acid
  SITE 14: note = L-glutamic acid, stapled with another amino acid residue comprising a side chain amino group to form a staple through the 4-carboxyl group
  SITE 15: note = C-term amino
XDXXDXXAFKXXXEA

SEQ ID NO: 1560 - protein, 15 aa, synthetic construct
  SITE 1: note = N-term Acetic Acid
  SITE 1: note = (R)-2-allylpyrrolidine-2-carboxylic acid, stapled with another amino acid residue comprising an olefin group to form a staple through the olefin group, olefin in staple converted to bivalent 1,2-ethylene
  SITE 3: note = L-glutamic acid, stapled with another amino acid residue comprising a side chain amino group to form another staple through the 4-carboxyl group
  VARIANT 4: note = 2-amino-2-(pent-4-en-1-yl)hept-6-enoic acid, stapled with another amino acid residue comprising an olefin group to form a staple through one of the two olefin groups and with another amino acid residue comprising an olefin group to form a staple through the other of the two olefin groups, olefin in each staple converted to bivalent 1,2-ethylene, S configuration
  SITE 6: note = (S)-3-(2-amino-2-carboxyethyl)benzoic acid
  SITE 7: note = L-lysine, stapled with another amino acid residue comprising a side chain acid group to form a staple through the 6-amino group
  SITE 10: note = L-lysine, stapled with another amino acid residue comprising a side chain acid group to form a staple through the 6-amino group
  SITE 11: note (S)-3-amino-1-((pent-4-en-1-yloxy)carbonyl)pyrrolidine-3-ca rboxylic acid, stapled with another amino acid residue comprising an olefin group to form a staple through the olefin group, olefin in staple converted to bivalent 1,2-ethylene
  SITE 12: note = (S)-2-amino-3-(2-(trifluoromethyl)phenyl)propanoic acid
  SITE 13: note = (S)-2-amino-3-(benzo[b]thiophen-3-yl)propanoic acid
  SITE 14: note = L-glutamic acid, stapled with another amino acid residue comprising a side chain amino group to form a staple through the 4-carboxyl group
  SITE 15: note = C-term amino
XDEXDXKAFKXXXEA

SEQ ID NO: 1561 - protein, 16 aa, synthetic construct
  SITE 1: note = N-term Acetic Acid
  SITE 1: note = (R)-2-allylpyrrolidine-2-carboxylic acid, stapled with another amino acid residue comprising an olefin group to form a staple through the olefin group, E olefin in the staple
  SITE 3: note = (S)-2-amino-4,4-dimethylpentanoic acid
  VARIANT 4: note = 2-amino-2-(pent-4-en-1-yl)hept-6-enoic acid, stapled with another amino acid residue comprising an olefin group to form a staple through one of the two olefin groups and with another amino acid residue comprising an olefin group to form a staple through the other of the two olefin groups, R configuration
  SITE 6: note = (S)-3-(2-amino-2-carboxyethyl)benzoic acid
  SITE 7: note = 2-amino-2-methylpropanoic acid
  SITE 10: note = L-lysine, stapled with another amino acid residue comprising a side chain acid group to form a staple through the 6-amino group
  SITE 11: note (S)-3-amino-1-((pent-4-en-1-yloxy)carbonyl)pyrrolidine-3-ca rboxylic acid, stapled with another amino acid residue comprising an olefin group to form a staple through the olefin group, E olefin in the staple
  SITE 12: note = (S)-2-amino-3-(2-(trifluoromethyl)phenyl)propanoic acid
  SITE 13: note = (S)-2-amino-3-(benzo[b]thiophen-3-yl)propanoic acid
  SITE 14: note = L-glutamic acid, stapled with another amino acid residue comprising a side chain amino group to form a staple through the 4-carboxyl group
  SITE 16: note = C-term amino
XDXXDXXAFKXXXELS

SEQ ID NO: 1562 - protein, 16 aa, synthetic construct
  SITE 1: note = N-term Acetic Acid
  SITE 1: note = (R)-2-allylpyrrolidine-2-carboxylic acid, stapled with another amino acid residue comprising an olefin group to form a staple through the olefin group, E olefin in the staple
  SITE 3: note = (S)-2-amino-4,4-dimethylpentanoic acid
  VARIANT 4: note = 2-amino-2-(pent-4-en-1-yl)hept-6-enoic acid, stapled with another amino acid residue comprising an olefin group to form a staple through one of the two olefin groups and with another amino acid residue comprising an olefin group to form a staple through the other of the two olefin groups, S configuration
  SITE 6: note = (S)-3-(2-amino-2-carboxyethyl)benzoic acid
  SITE 7: note = 2-amino-2-methylpropanoic acid
  SITE 10: note = L-lysine, stapled with another amino acid residue comprising a side chain acid group to form a staple through the 6-amino group
  SITE 11: note (S)-3-amino-1-((pent-4-en-1-yloxy)carbonyl)pyrrolidine-3-ca rboxylic acid, stapled with another amino acid residue comprising an olefin group to form a staple through the olefin group, E olefin in the staple
  SITE 12: note = (S)-2-amino-3-(2-(trifluoromethyl)phenyl)propanoic acid
  SITE 13: note = (S)-2-amino-3-(benzo[b]thiophen-3-yl)propanoic acid
  SITE 14: note = L-glutamic acid, stapled with another amino acid residue comprising a side chain amino group to form a staple through the 4-carboxyl group
  SITE 16: note = C-term amino
XDXXDXXAFKXXXELS

SEQ ID NO: 1563 - protein, 16 aa, synthetic construct
  SITE 1: note = N-term Acetic Acid
  SITE 1: note = (R)-2-allylpyrrolidine-2-carboxylic acid, stapled with another amino acid residue comprising an olefin group to form a staple through the olefin group, Z olefin in the staple
  SITE 3: note = (S)-2-amino-4,4-dimethylpentanoic acid
  VARIANT 4: note = 2-amino-2-(pent-4-en-1-yl)hept-6-enoic acid, stapled with another amino acid residue comprising an olefin group to form a staple through one of the two olefin groups and with another amino acid residue comprising an olefin group to form a staple through the other of the two olefin groups, R configuration
  SITE 6: note = (S)-3-(2-amino-2-carboxyethyl)benzoic acid
  SITE 7: note = 2-amino-2-methylpropanoic acid
  SITE 10: note = L-lysine, stapled with another amino acid residue comprising a side chain acid group to form a staple through the 6-amino group
  SITE 11: note (S)-3-amino-1-((pent-4-en-1-yloxy)carbonyl)pyrrolidine-3-ca rboxylic acid, stapled with another amino acid residue comprising an olefin group to form a staple through the olefin group, E olefin in the staple
  SITE 12: note = (S)-2-amino-3-(2-(trifluoromethyl)phenyl)propanoic acid
  SITE 13: note = (S)-2-amino-3-(benzo[b]thiophen-3-yl)propanoic acid
  SITE 14: note = L-glutamic acid, stapled with another amino acid residue comprising a side chain amino group to form a staple through the 4-carboxyl group
  SITE 16: note = C-term amino
XDXXDXXAFKXXXELS

SEQ ID NO: 1564 - protein, 16 aa, synthetic construct
  SITE 1: note = N-term Acetic Acid
  SITE 1: note = (R)-2-allylpyrrolidine-2-carboxylic acid, stapled with another amino acid residue comprising an olefin group to form a staple through the olefin group, Z olefin in the staple
  SITE 3: note = (S)-2-amino-4,4-dimethylpentanoic acid
  VARIANT 4: note = 2-amino-2-(pent-4-en-1-yl)hept-6-enoic acid, stapled with another amino acid residue comprising an olefin group to form a staple through one of the two olefin groups and with another amino acid residue comprising an olefin group to form a staple through the other of the two olefin groups, S configuration
  SITE 6: note = (S)-3-(2-amino-2-carboxyethyl)benzoic acid
  SITE 7: note = 2-amino-2-methylpropanoic acid
  SITE 10: note = L-lysine, stapled with another amino acid residue comprising a side chain acid group to form a staple through the 6-amino group
  SITE 11: note (S)-3-amino-1-((pent-4-en-1-yloxy)carbonyl)pyrrolidine-3-ca rboxylic acid, stapled with another amino acid residue comprising an olefin group to form a staple through the olefin group, E olefin in the staple
  SITE 12: note = (S)-2-amino-3-(2-(trifluoromethyl)phenyl)propanoic acid
  SITE 13: note = (S)-2-amino-3-(benzo[b]thiophen-3-yl)propanoic acid
  SITE 14: note = L-glutamic acid, stapled with another amino acid residue comprising a side chain amino group to form a staple through the 4-carboxyl group
  SITE 16: note = C-term amino
XDXXDXXAFKXXXELS

SEQ ID NO: 1565 - protein, 16 aa, synthetic construct
  SITE 1: note = N-term Acetic Acid
  SITE 1: note = (R)-2-allylpyrrolidine-2-carboxylic acid, stapled with another amino acid residue comprising an olefin group to form a staple through the olefin group, Z olefin in the staple
  SITE 3: note = (S)-2-amino-4,4-dimethylpentanoic acid
  VARIANT 4: note = 2-amino-2-(pent-4-en-1-yl)hept-6-enoic acid, stapled with another amino acid residue comprising an olefin group to form a staple through one of the two olefin groups and with another amino acid residue comprising an olefin group to form a staple through the other of the two olefin groups, R configuration
  SITE 6: note = (S)-3-(2-amino-2-carboxyethyl)benzoic acid
  SITE 7: note = 2-amino-2-methylpropanoic acid
  SITE 10: note = L-lysine, stapled with another amino acid residue comprising a side chain acid group to form a staple through the 6-amino group
  SITE 11: note (S)-3-amino-1-((pent-4-en-1-yloxy)carbonyl)pyrrolidine-3-ca rboxylic acid, stapled with another amino acid residue comprising an olefin group to form a staple through the olefin group, Z olefin in the staple
  SITE 12: note = (S)-2-amino-3-(2-(trifluoromethyl)phenyl)propanoic acid
  SITE 13: note = (S)-2-amino-3-(benzo[b]thiophen-3-yl)propanoic acid
  SITE 14: note = L-glutamic acid, stapled with another amino acid residue comprising a side chain amino group to form a staple through the 4-carboxyl group
  SITE 16: note = C-term amino
XDXXDXXAFKXXXELS

SEQ ID NO: 1566 - protein, 16 aa, synthetic construct
  SITE 1: note = N-term Acetic Acid
  SITE 1: note = (R)-2-allylpyrrolidine-2-carboxylic acid, stapled with another amino acid residue comprising an olefin group to form a staple through the olefin group, Z olefin in the staple
  SITE 3: note = (S)-2-amino-4,4-dimethylpentanoic acid
  VARIANT 4: note = 2-amino-2-(pent-4-en-1-yl)hept-6-enoic acid, stapled with another amino acid residue comprising an olefin group to form a staple through one of the two olefin groups and with another amino acid residue comprising an olefin group to form a staple through the other of the two olefin groups, S configuration
  SITE 6: note = (S)-3-(2-amino-2-carboxyethyl)benzoic acid
  SITE 7: note = 2-amino-2-methylpropanoic acid
  SITE 10: note = L-lysine, stapled with another amino acid residue comprising a side chain acid group to form a staple through the 6-amino group
  SITE 11: note (S)-3-amino-1-((pent-4-en-1-yloxy)carbonyl)pyrrolidine-3-ca rboxylic acid, stapled with another amino acid residue comprising an olefin group to form a staple through the olefin group, Z olefin in the staple
  SITE 12: note = (S)-2-amino-3-(2-(trifluoromethyl)phenyl)propanoic acid
  SITE 13: note = (S)-2-amino-3-(benzo[b]thiophen-3-yl)propanoic acid
  SITE 14: note = L-glutamic acid, stapled with another amino acid residue comprising a side chain amino group to form a staple through the 4-carboxyl group
  SITE 16: note = C-term amino
XDXXDXXAFKXXXELS

SEQ ID NO: 1567 - protein, 16 aa, synthetic construct
  SITE 1: note = N-term Acetic Acid
  SITE 1: note = (R)-2-allylpyrrolidine-2-carboxylic acid, stapled with another amino acid residue comprising an olefin group to form a staple through the olefin group, E olefin in the staple
  SITE 3: note = (S)-2-amino-4,4-dimethylpentanoic acid
  VARIANT 4: note = 2-amino-2-(pent-4-en-1-yl)hept-6-enoic acid, stapled with another amino acid residue comprising an olefin group to form a staple through one of the two olefin groups and with another amino acid residue comprising an olefin group to form a staple through the other of the two olefin groups, R configuration
  SITE 6: note = (S)-3-(2-amino-2-carboxyethyl)benzoic acid
  SITE 7: note = 2-amino-2-methylpropanoic acid
  SITE 10: note = L-lysine, stapled with another amino acid residue comprising a side chain acid group to form a staple through the 6-amino group
  SITE 11: note (S)-3-amino-1-((pent-4-en-1-yloxy)carbonyl)pyrrolidine-3-ca rboxylic acid, stapled with another amino acid residue comprising an olefin group to form a staple through the olefin group, Z olefin in the staple
  SITE 12: note = (S)-2-amino-3-(2-(trifluoromethyl)phenyl)propanoic acid
  SITE 13: note = (S)-2-amino-3-(benzo[b]thiophen-3-yl)propanoic acid
  SITE 14: note = L-glutamic acid, stapled with another amino acid residue comprising a side chain amino group to form a staple through the 4-carboxyl group
  SITE 16: note = C-term amino
XDXXDXXAFKXXXELS

SEQ ID NO: 1568 - protein, 16 aa, synthetic construct
  SITE 1: note = N-term Acetic Acid
  SITE 1: note = (R)-2-allylpyrrolidine-2-carboxylic acid, stapled with another amino acid residue comprising an olefin group to form a staple through the olefin group, E olefin in the staple
  SITE 3: note = (S)-2-amino-4,4-dimethylpentanoic acid
  VARIANT 4: note = 2-amino-2-(pent-4-en-1-yl)hept-6-enoic acid, stapled with another amino acid residue comprising an olefin group to form a staple through one of the two olefin groups and with another amino acid residue comprising an olefin group to form a staple through the other of the two olefin groups, S configuration
  SITE 6: note = (S)-3-(2-amino-2-carboxyethyl)benzoic acid
  SITE 7: note = 2-amino-2-methylpropanoic acid
  SITE 10: note = L-lysine, stapled with another amino acid residue comprising a side chain acid group to form a staple through the 6-amino group
  SITE 11: note (S)-3-amino-1-((pent-4-en-1-yloxy)carbonyl)pyrrolidine-3-ca rboxylic acid, stapled with another amino acid residue comprising an olefin group to form a staple through the olefin group, Z olefin in the staple
  SITE 12: note = (S)-2-amino-3-(2-(trifluoromethyl)phenyl)propanoic acid
  SITE 13: note = (S)-2-amino-3-(benzo[b]thiophen-3-yl)propanoic acid
  SITE 14: note = L-glutamic acid, stapled with another amino acid residue comprising a side chain amino group to form a staple through the 4-carboxyl group
  SITE 16: note = C-term amino
XDXXDXXAFKXXXELS

SEQ ID NO: 1569 - protein, 15 aa, synthetic construct
  SITE 1: note = N-term Acetic Acid
  SITE 1: note = (R)-2-allylpyrrolidine-2-carboxylic acid, stapled with another amino acid residue comprising an olefin group to form a staple through the olefin group, E olefin in the staple
  SITE 3: note = (S)-2-amino-2-cyclohexylacetic acid
  VARIANT 4: note = 2-amino-2-(pent-4-en-1-yl)hept-6-enoic acid, stapled with another amino acid residue comprising an olefin group to form a staple through one of the two olefin groups and with another amino acid residue comprising an olefin group to form a staple through the other of the two olefin groups, R configuration
  SITE 6: note = (S)-3-(2-amino-2-carboxyethyl)benzoic acid
  SITE 7: note = 2-amino-2-methylpropanoic acid
  SITE 10: note = L-lysine, stapled with another amino acid residue comprising a side chain acid group to form a staple through the 6-amino group
  SITE 11: note (S)-3-amino-1-((pent-4-en-1-yloxy)carbonyl)pyrrolidine-3-ca rboxylic acid, stapled with another amino acid residue comprising an olefin group to form a staple through the olefin group, E olefin in the staple
  SITE 12: note = (S)-2-amino-3-(thiophen-3-yl)propanoic acid
  SITE 13: note = (S)-2-amino-3-(benzo[b]thiophen-3-yl)propanoic acid
  SITE 14: note = L-glutamic acid, stapled with another amino acid residue comprising a side chain amino group to form a staple through the 4-carboxyl group
  SITE 15: note = C-term amino
XDXXDXXAFKXXXEA

SEQ ID NO: 1570 - protein, 15 aa, synthetic construct
  SITE 1: note = N-term Acetic Acid
  SITE 1: note = (R)-2-allylpyrrolidine-2-carboxylic acid, stapled with another amino acid residue comprising an olefin group to form a staple through the olefin group, E olefin in the staple
  SITE 3: note = (S)-2-amino-2-cyclohexylacetic acid
  VARIANT 4: note = 2-amino-2-(pent-4-en-1-yl)hept-6-enoic acid, stapled with another amino acid residue comprising an olefin group to form a staple through one of the two olefin groups and with another amino acid residue comprising an olefin group to form a staple through the other of the two olefin groups, S configuration
  SITE 6: note = (S)-3-(2-amino-2-carboxyethyl)benzoic acid
  SITE 7: note = 2-amino-2-methylpropanoic acid
  SITE 10: note = L-lysine, stapled with another amino acid residue comprising a side chain acid group to form a staple through the 6-amino group
  SITE 11: note (S)-3-amino-1-((pent-4-en-1-yloxy)carbonyl)pyrrolidine-3-ca rboxylic acid, stapled with another amino acid residue comprising an olefin group to form a staple through the olefin group, E olefin in the staple
  SITE 12: note = (S)-2-amino-3-(thiophen-3-yl)propanoic acid
  SITE 13: note = (S)-2-amino-3-(benzo[b]thiophen-3-yl)propanoic acid
  SITE 14: note = L-glutamic acid, stapled with another amino acid residue comprising a side chain amino group to form a staple through the 4-carboxyl group
  SITE 15: note = C-term amino
XDXXDXXAFKXXXEA

SEQ ID NO: 1571 - protein, 15 aa, synthetic construct
  SITE 1: note = N-term Acetic Acid
  SITE 1: note = (R)-2-allylpyrrolidine-2-carboxylic acid, stapled with another amino acid residue comprising an olefin group to form a staple through the olefin group, Z olefin in the staple
  SITE 3: note = (S)-2-amino-2-cyclohexylacetic acid
  VARIANT 4: note = 2-amino-2-(pent-4-en-1-yl)hept-6-enoic acid, stapled with another amino acid residue comprising an olefin group to form a staple through one of the two olefin groups and with another amino acid residue comprising an olefin group to form a staple through the other of the two olefin groups, R configuration
  SITE 6: note = (S)-3-(2-amino-2-carboxyethyl)benzoic acid
  SITE 7: note = 2-amino-2-methylpropanoic acid
  SITE 10: note = L-lysine, stapled with another amino acid residue comprising a side chain acid group to form a staple through the 6-amino group
  SITE 11: note (S)-3-amino-1-((pent-4-en-1-yloxy)carbonyl)pyrrolidine-3-ca rboxylic acid, stapled with another amino acid residue comprising an olefin group to form a staple through the olefin group, E olefin in the staple
  SITE 12: note = (S)-2-amino-3-(thiophen-3-yl)propanoic acid
  SITE 13: note = (S)-2-amino-3-(benzo[b]thiophen-3-yl)propanoic acid
  SITE 14: note = L-glutamic acid, stapled with another amino acid residue comprising a side chain amino group to form a staple through the 4-carboxyl group
  SITE 15: note = C-term amino
XDXXDXXAFKXXXEA

SEQ ID NO: 1572 - protein, 15 aa, synthetic construct
  SITE 1: note = N-term Acetic Acid
  SITE 1: note = (R)-2-allylpyrrolidine-2-carboxylic acid, stapled with another amino acid residue comprising an olefin group to form a staple through the olefin group, Z olefin in the staple
  SITE 3: note = (S)-2-amino-2-cyclohexylacetic acid
  VARIANT 4: note = 2-amino-2-(pent-4-en-1-yl)hept-6-enoic acid, stapled with another amino acid residue comprising an olefin group to form a staple through one of the two olefin groups and with another amino acid residue comprising an olefin group to form a staple through the other of the two olefin groups, S configuration
  SITE 6: note = (S)-3-(2-amino-2-carboxyethyl)benzoic acid
  SITE 7: note = 2-amino-2-methylpropanoic acid
  SITE 10: note = L-lysine, stapled with another amino acid residue comprising a side chain acid group to form a staple through the 6-amino group
  SITE 11: note (S)-3-amino-1-((pent-4-en-1-yloxy)carbonyl)pyrrolidine-3-ca rboxylic acid, stapled with another amino acid residue comprising an olefin group to form a staple through the olefin group, E olefin in the staple
  SITE 12: note = (S)-2-amino-3-(thiophen-3-yl)propanoic acid
  SITE 13: note = (S)-2-amino-3-(benzo[b]thiophen-3-yl)propanoic acid
  SITE 14: note = L-glutamic acid, stapled with another amino acid residue comprising a side chain amino group to form a staple through the 4-carboxyl group
  SITE 15: note = C-term amino
XDXXDXXAFKXXXEA

SEQ ID NO: 1573 - protein, 15 aa, synthetic construct
  SITE 1: note = N-term Acetic Acid
  SITE 1: note = (R)-2-allylpyrrolidine-2-carboxylic acid, stapled with another amino acid residue comprising an olefin group to form a staple through the olefin group, Z olefin in the staple
  SITE 3: note = (S)-2-amino-2-cyclohexylacetic acid
  VARIANT 4: note = 2-amino-2-(pent-4-en-1-yl)hept-6-enoic acid, stapled with another amino acid residue comprising an olefin group to form a staple through one of the two olefin groups and with another amino acid residue comprising an olefin group to form a staple through the other of the two olefin groups, R configuration
  SITE 6: note = (S)-3-(2-amino-2-carboxyethyl)benzoic acid
  SITE 7: note = 2-amino-2-methylpropanoic acid
  SITE 10: note = L-lysine, stapled with another amino acid residue comprising a side chain acid group to form a staple through the 6-amino group
  SITE 11: note (S)-3-amino-1-((pent-4-en-1-yloxy)carbonyl)pyrrolidine-3-ca rboxylic acid, stapled with another amino acid residue comprising an olefin group to form a staple through the olefin group, Z olefin in the staple
  SITE 12: note = (S)-2-amino-3-(thiophen-3-yl)propanoic acid
  SITE 13: note = (S)-2-amino-3-(benzo[b]thiophen-3-yl)propanoic acid
  SITE 14: note = L-glutamic acid, stapled with another amino acid residue comprising a side chain amino group to form a staple through the 4-carboxyl group
  SITE 15: note = C-term amino
XDXXDXXAFKXXXEA

SEQ ID NO: 1574 - protein, 15 aa, synthetic construct
  SITE 1: note = N-term Acetic Acid
  SITE 1: note = (R)-2-allylpyrrolidine-2-carboxylic acid, stapled with another amino acid residue comprising an olefin group to form a staple through the olefin group, Z olefin in the staple
  SITE 3: note = (S)-2-amino-2-cyclohexylacetic acid
  VARIANT 4: note = 2-amino-2-(pent-4-en-1-yl)hept-6-enoic acid, stapled with another amino acid residue comprising an olefin group to form a staple through one of the two olefin groups and with another amino acid residue comprising an olefin group to form a staple through the other of the two olefin groups, S configuration
  SITE 6: note = (S)-3-(2-amino-2-carboxyethyl)benzoic acid
  SITE 7: note = 2-amino-2-methylpropanoic acid
  SITE 10: note = L-lysine, stapled with another amino acid residue comprising a side chain acid group to form a staple through the 6-amino group
  SITE 11: note (S)-3-amino-1-((pent-4-en-1-yloxy)carbonyl)pyrrolidine-3-ca rboxylic acid, stapled with another amino acid residue comprising an olefin group to form a staple through the olefin group, Z olefin in the staple
  SITE 12: note = (S)-2-amino-3-(thiophen-3-yl)propanoic acid
  SITE 13: note = (S)-2-amino-3-(benzo[b]thiophen-3-yl)propanoic acid
  SITE 14: note = L-glutamic acid, stapled with another amino acid residue comprising a side chain amino group to form a staple through the 4-carboxyl group
  SITE 15: note = C-term amino
XDXXDXXAFKXXXEA

SEQ ID NO: 1575 - protein, 15 aa, synthetic construct
  SITE 1: note = N-term Acetic Acid
  SITE 1: note = (R)-2-allylpyrrolidine-2-carboxylic acid, stapled with another amino acid residue comprising an olefin group to form a staple through the olefin group, E olefin in the staple
  SITE 3: note = (S)-2-amino-2-cyclohexylacetic acid
  VARIANT 4: note = 2-amino-2-(pent-4-en-1-yl)hept-6-enoic acid, stapled with another amino acid residue comprising an olefin group to form a staple through one of the two olefin groups and with another amino acid residue comprising an olefin group to form a staple through the other of the two olefin groups, R configuration
  SITE 6: note = (S)-3-(2-amino-2-carboxyethyl)benzoic acid
  SITE 7: note = 2-amino-2-methylpropanoic acid
  SITE 10: note = L-lysine, stapled with another amino acid residue comprising a side chain acid group to form a staple through the 6-amino group
  SITE 11: note (S)-3-amino-1-((pent-4-en-1-yloxy)carbonyl)pyrrolidine-3-ca rboxylic acid, stapled with another amino acid residue comprising an olefin group to form a staple through the olefin group, Z olefin in the staple
  SITE 12: note = (S)-2-amino-3-(thiophen-3-yl)propanoic acid
  SITE 13: note = (S)-2-amino-3-(benzo[b]thiophen-3-yl)propanoic acid
  SITE 14: note = L-glutamic acid, stapled with another amino acid residue comprising a side chain amino group to form a staple through the 4-carboxyl group
  SITE 15: note = C-term amino
XDXXDXXAFKXXXEA

SEQ ID NO: 1576 - protein, 15 aa, synthetic construct
  SITE 1: note = N-term Acetic Acid
  SITE 1: note = (R)-2-allylpyrrolidine-2-carboxylic acid, stapled with another amino acid residue comprising an olefin group to form a staple through the olefin group, E olefin in the staple
  SITE 3: note = (S)-2-amino-2-cyclohexylacetic acid
  VARIANT 4: note = 2-amino-2-(pent-4-en-1-yl)hept-6-enoic acid, stapled with another amino acid residue comprising an olefin group to form a staple through one of the two olefin groups and with another amino acid residue comprising an olefin group to form a staple through the other of the two olefin groups, S configuration
  SITE 6: note = (S)-3-(2-amino-2-carboxyethyl)benzoic acid
  SITE 7: note = 2-amino-2-methylpropanoic acid
  SITE 10: note = L-lysine, stapled with another amino acid residue comprising a side chain acid group to form a staple through the 6-amino group
  SITE 11: note (S)-3-amino-1-((pent-4-en-1-yloxy)carbonyl)pyrrolidine-3-ca rboxylic acid, stapled with another amino acid residue comprising an olefin group to form a staple through the olefin group, Z olefin in the staple
  SITE 12: note = (S)-2-amino-3-(thiophen-3-yl)propanoic acid
  SITE 13: note = (S)-2-amino-3-(benzo[b]thiophen-3-yl)propanoic acid
  SITE 14: note = L-glutamic acid, stapled with another amino acid residue comprising a side chain amino group to form a staple through the 4-carboxyl group
  SITE 15: note = C-term amino
XDXXDXXAFKXXXEA

SEQ ID NO: 1577 - protein, 15 aa, synthetic construct
  SITE 1: note = N-term Acetic Acid
  SITE 1: note = (R)-2-allylpyrrolidine-2-carboxylic acid, stapled with another amino acid residue comprising an olefin group to form a staple through the olefin group, Z olefin in the staple
  SITE 3: note = (S)-2-amino-4,4-dimethylpentanoic acid
  VARIANT 4: note = 2-amino-2-(pent-4-en-1-yl)hept-6-enoic acid, stapled with another amino acid residue comprising an olefin group to form a staple through one of the two olefin groups and with another amino acid residue comprising an olefin group to form a staple through the other of the two olefin groups, S configuration
  SITE 6: note = (S)-3-(2-amino-2-carboxyethyl)benzoic acid
  SITE 7: note = 2-amino-2-methylpropanoic acid
  SITE 10: note = (S)-2-amino-6-(1H-1,2,3-triazol-1-yl)hexanoic acid, stapled with another amino acid residue to form a staple through the 4-position of the triazolyl group
  SITE 11: note (S)-3-amino-1-((pent-4-en-1-yloxy)carbonyl)pyrrolidine-3-ca rboxylic acid, stapled with another amino acid residue comprising an olefin group to form a staple through the olefin group, E olefin in the staple
  SITE 12: note = (S)-2-amino-3-(thiophen-3-yl)propanoic acid
  SITE 13: note = (S)-2-amino-3-(benzo[b]thiophen-3-yl)propanoic acid
  SITE 14: note = O-methyl-L-serine, stapled with another amino acid residue comprising a triazolyl group to form a staple through the terminal methyl group
  SITE 15: note = C-term amino
XDXXDXXAFXXXXSA

SEQ ID NO: 1578 - protein, 15 aa, synthetic construct
  SITE 1: note = N-term Acetic Acid
  SITE 1: note = (R)-2-allylpyrrolidine-2-carboxylic acid, stapled with another amino acid residue comprising an olefin group to form a staple through the olefin group, Z olefin in the staple
  SITE 3: note = (S)-2-amino-4,4-dimethylpentanoic acid
  VARIANT 4: note = 2-amino-2-(pent-4-en-1-yl)hept-6-enoic acid, stapled with another amino acid residue comprising an olefin group to form a staple through one of the two olefin groups and with another amino acid residue comprising an olefin group to form a staple through the other of the two olefin groups, R configuration
  SITE 6: note = (S)-3-(2-amino-2-carboxyethyl)benzoic acid
  SITE 7: note = 2-amino-2-methylpropanoic acid
  SITE 10: note = (S)-2-amino-6-(1H-1,2,3-triazol-1-yl)hexanoic acid, stapled with another amino acid residue to form a staple through the 4-position of the triazolyl group
  SITE 11: note (S)-3-amino-1-((pent-4-en-1-yloxy)carbonyl)pyrrolidine-3-ca rboxylic acid, stapled with another amino acid residue comprising an olefin group to form a staple through the olefin group, E olefin in the staple
  SITE 12: note = (S)-2-amino-3-(thiophen-3-yl)propanoic acid
  SITE 13: note = (S)-2-amino-3-(benzo[b]thiophen-3-yl)propanoic acid
  SITE 14: note = O-methyl-L-serine, stapled with another amino acid residue comprising a triazolyl group to form a staple through the terminal methyl group
  SITE 15: note = C-term amino
XDXXDXXAFXXXXSA

SEQ ID NO: 1579 - protein, 15 aa, synthetic construct
  SITE 1: note = N-term Acetic Acid
  SITE 1: note = (R)-2-allylpyrrolidine-2-carboxylic acid, stapled with another amino acid residue comprising an olefin group to form a staple through the olefin group, E olefin in the staple
  SITE 3: note = (S)-2-amino-4,4-dimethylpentanoic acid
  VARIANT 4: note = 2-amino-2-(pent-4-en-1-yl)hept-6-enoic acid, stapled with another amino acid residue comprising an olefin group to form a staple through one of the two olefin groups and with another amino acid residue comprising an olefin group to form a staple through the other of the two olefin groups, S configuration
  SITE 6: note = (S)-3-(2-amino-2-carboxyethyl)benzoic acid
  SITE 7: note = 2-amino-2-methylpropanoic acid
  SITE 10: note = (S)-2-amino-6-(1H-1,2,3-triazol-1-yl)hexanoic acid, stapled with another amino acid residue to form a staple through the 4-position of the triazolyl group
  SITE 11: note (S)-3-amino-1-((pent-4-en-1-yloxy)carbonyl)pyrrolidine-3-ca rboxylic acid, stapled with another amino acid residue comprising an olefin group to form a staple through the olefin group, E olefin in the staple
  SITE 12: note = (S)-2-amino-3-(thiophen-3-yl)propanoic acid
  SITE 13: note = (S)-2-amino-3-(benzo[b]thiophen-3-yl)propanoic acid
  SITE 14: note = O-methyl-L-serine, stapled with another amino acid residue comprising a triazolyl group to form a staple through the terminal methyl group
  SITE 15: note = C-term amino
XDXXDXXAFXXXXSA

SEQ ID NO: 1580 - protein, 15 aa, synthetic construct
  SITE 1: note = N-term Acetic Acid
  SITE 1: note = (R)-2-allylpyrrolidine-2-carboxylic acid, stapled with another amino acid residue comprising an olefin group to form a staple through the olefin group, E olefin in the staple
  SITE 3: note = (S)-2-amino-4,4-dimethylpentanoic acid
  VARIANT 4: note = 2-amino-2-(pent-4-en-1-yl)hept-6-enoic acid, stapled with another amino acid residue comprising an olefin group to form a staple through one of the two olefin groups and with another amino acid residue comprising an olefin group to form a staple through the other of the two olefin groups, R configuration
  SITE 6: note = (S)-3-(2-amino-2-carboxyethyl)benzoic acid
  SITE 7: note = 2-amino-2-methylpropanoic acid
  SITE 10: note = (S)-2-amino-6-(1H-1,2,3-triazol-1-yl)hexanoic acid, stapled with another amino acid residue to form a staple through the 4-position of the triazolyl group
  SITE 11: note (S)-3-amino-1-((pent-4-en-1-yloxy)carbonyl)pyrrolidine-3-ca rboxylic acid, stapled with another amino acid residue comprising an olefin group to form a staple through the olefin group, E olefin in the staple
  SITE 12: note = (S)-2-amino-3-(thiophen-3-yl)propanoic acid
  SITE 13: note = (S)-2-amino-3-(benzo[b]thiophen-3-yl)propanoic acid
  SITE 14: note = O-methyl-L-serine, stapled with another amino acid residue comprising a triazolyl group to form a staple through the terminal methyl group
  SITE 15: note = C-term amino
XDXXDXXAFXXXXSA

SEQ ID NO: 1581 - protein, 15 aa, synthetic construct
  SITE 1: note = N-term Acetic Acid
  SITE 1: note = (R)-2-allylpyrrolidine-2-carboxylic acid, stapled with another amino acid residue comprising an olefin group to form a staple through the olefin group, E olefin in the staple
  SITE 3: note = (S)-2-amino-4,4-dimethylpentanoic acid
  VARIANT 4: note = 2-amino-2-(pent-4-en-1-yl)hept-6-enoic acid, stapled with another amino acid residue comprising an olefin group to form a staple through one of the two olefin groups and with another amino acid residue comprising an olefin group to form a staple through the other of the two olefin groups, S configuration
  SITE 6: note = (S)-3-(2-amino-2-carboxyethyl)benzoic acid
  SITE 7: note = 2-amino-2-methylpropanoic acid
  SITE 10: note = (S)-2-amino-6-(1H-1,2,3-triazol-1-yl)hexanoic acid, stapled with another amino acid residue to form a staple through the 4-position of the triazolyl group
  SITE 11: note (S)-3-amino-1-((pent-4-en-1-yloxy)carbonyl)pyrrolidine-3-ca rboxylic acid, stapled with another amino acid residue comprising an olefin group to form a staple through the olefin group, Z olefin in the staple
  SITE 12: note = (S)-2-amino-3-(thiophen-3-yl)propanoic acid
  SITE 13: note = (S)-2-amino-3-(benzo[b]thiophen-3-yl)propanoic acid
  SITE 14: note = O-methyl-L-serine, stapled with another amino acid residue comprising a triazolyl group to form a staple through the terminal methyl group
  SITE 15: note = C-term amino
XDXXDXXAFXXXXSA

SEQ ID NO: 1582 - protein, 15 aa, synthetic construct
  SITE 1: note = N-term Acetic Acid
  SITE 1: note = (R)-2-allylpyrrolidine-2-carboxylic acid, stapled with another amino acid residue comprising an olefin group to form a staple through the olefin group, E olefin in the staple
  SITE 3: note = (S)-2-amino-4,4-dimethylpentanoic acid
  VARIANT 4: note = 2-amino-2-(pent-4-en-1-yl)hept-6-enoic acid, stapled with another amino acid residue comprising an olefin group to form a staple through one of the two olefin groups and with another amino acid residue comprising an olefin group to form a staple through the other of the two olefin groups, R configuration
  SITE 6: note = (S)-3-(2-amino-2-carboxyethyl)benzoic acid
  SITE 7: note = 2-amino-2-methylpropanoic acid
  SITE 10: note = (S)-2-amino-6-(1H-1,2,3-triazol-1-yl)hexanoic acid, stapled with another amino acid residue to form a staple through the 4-position of the triazolyl group
  SITE 11: note (S)-3-amino-1-((pent-4-en-1-yloxy)carbonyl)pyrrolidine-3-ca rboxylic acid, stapled with another amino acid residue comprising an olefin group to form a staple through the olefin group, Z olefin in the staple
  SITE 12: note = (S)-2-amino-3-(thiophen-3-yl)propanoic acid
  SITE 13: note = (S)-2-amino-3-(benzo[b]thiophen-3-yl)propanoic acid
  SITE 14: note = O-methyl-L-serine, stapled with another amino acid residue comprising a triazolyl group to form a staple through the terminal methyl group
  SITE 15: note = C-term amino
XDXXDXXAFXXXXSA

SEQ ID NO: 1583 - protein, 15 aa, synthetic construct
  SITE 1: note = N-term Acetic Acid
  SITE 1: note = (R)-2-allylpyrrolidine-2-carboxylic acid, stapled with another amino acid residue comprising an olefin group to form a staple through the olefin group, Z olefin in the staple
  SITE 3: note = (S)-2-amino-4,4-dimethylpentanoic acid
  VARIANT 4: note = 2-amino-2-(pent-4-en-1-yl)hept-6-enoic acid, stapled with another amino acid residue comprising an olefin group to form a staple through one of the two olefin groups and with another amino acid residue comprising an olefin group to form a staple through the other of the two olefin groups, S configuration
  SITE 6: note = (S)-3-(2-amino-2-carboxyethyl)benzoic acid
  SITE 7: note = 2-amino-2-methylpropanoic acid
  SITE 10: note = (S)-2-amino-6-(1H-1,2,3-triazol-1-yl)hexanoic acid, stapled with another amino acid residue to form a staple through the 4-position of the triazolyl group
  SITE 11: note (S)-3-amino-1-((pent-4-en-1-yloxy)carbonyl)pyrrolidine-3-ca rboxylic acid, stapled with another amino acid residue comprising an olefin group to form a staple through the olefin group, Z olefin in the staple
  SITE 12: note = (S)-2-amino-3-(thiophen-3-yl)propanoic acid
  SITE 13: note = (S)-2-amino-3-(benzo[b]thiophen-3-yl)propanoic acid
  SITE 14: note = O-methyl-L-serine, stapled with another amino acid residue comprising a triazolyl group to form a staple through the terminal methyl group
  SITE 15: note = C-term amino
XDXXDXXAFXXXXSA

SEQ ID NO: 1584 - protein, 15 aa, synthetic construct
  SITE 1: note = N-term Acetic Acid
  SITE 1: note = (R)-2-allylpyrrolidine-2-carboxylic acid, stapled with another amino acid residue comprising an olefin group to form a staple through the olefin group, Z olefin in the staple
  SITE 3: note = (S)-2-amino-4,4-dimethylpentanoic acid
  VARIANT 4: note = 2-amino-2-(pent-4-en-1-yl)hept-6-enoic acid, stapled with another amino acid residue comprising an olefin group to form a staple through one of the two olefin groups and with another amino acid residue comprising an olefin group to form a staple through the other of the two olefin groups, R configuration
  SITE 6: note = (S)-3-(2-amino-2-carboxyethyl)benzoic acid
  SITE 7: note = 2-amino-2-methylpropanoic acid
  SITE 10: note = (S)-2-amino-6-(1H-1,2,3-triazol-1-yl)hexanoic acid, stapled with another amino acid residue to form a staple through the 4-position of the triazolyl group
  SITE 11: note (S)-3-amino-1-((pent-4-en-1-yloxy)carbonyl)pyrrolidine-3-ca rboxylic acid, stapled with another amino acid residue comprising an olefin group to form a staple through the olefin group, Z olefin in the staple
  SITE 12: note = (S)-2-amino-3-(thiophen-3-yl)propanoic acid
  SITE 13: note = (S)-2-amino-3-(benzo[b]thiophen-3-yl)propanoic acid
  SITE 14: note = O-methyl-L-serine, stapled with another amino acid residue comprising a triazolyl group to form a staple through the terminal methyl group
  SITE 15: note = C-term amino
XDXXDXXAFXXXXSA

SEQ ID NO: 1585 - protein, 15 aa, synthetic construct
  SITE 1: note = N-term Acetic Acid
  SITE 1: note = (R)-2-allylpyrrolidine-2-carboxylic acid, stapled with another amino acid residue comprising an olefin group to form a staple through the olefin group, E olefin in the staple
  SITE 3: note = (S)-2-amino-4,4-dimethylpentanoic acid
  VARIANT 4: note = 2-amino-2-(pent-4-en-1-yl)hept-6-enoic acid, stapled with another amino acid residue comprising an olefin group to form a staple through one of the two olefin groups and with another amino acid residue comprising an olefin group to form a staple through the other of the two olefin groups, R configuration
  SITE 6: note = (S)-3-(2-amino-2-carboxyethyl)benzoic acid
  SITE 7: note = 2-amino-2-methylpropanoic acid
  SITE 10: note = L-lysine, stapled with another amino acid residue comprising a side chain acid group to form a staple through the 6-amino group
  SITE 11: note (S)-3-amino-1-((pent-4-en-1-yloxy)carbonyl)pyrrolidine-3-ca rboxylic acid, stapled with another amino acid residue comprising an olefin group to form a staple through the olefin group, E olefin in the staple
  SITE 12: note = (S)-2-amino-3-(o-tolyl)propanoic acid
  SITE 13: note = (S)-2-amino-3-(benzo[b]thiophen-3-yl)propanoic acid
  SITE 14: note = L-glutamic acid, stapled with another amino acid residue comprising a side chain amino group to form a staple through the 4-carboxyl group
  SITE 15: note = C-term amino
XDXXDXXAFKXXXEA

SEQ ID NO: 1586 - protein, 15 aa, synthetic construct
  SITE 1: note = N-term Acetic Acid
  SITE 1: note = (R)-2-allylpyrrolidine-2-carboxylic acid, stapled with another amino acid residue comprising an olefin group to form a staple through the olefin group, E olefin in the staple
  SITE 3: note = (S)-2-amino-4,4-dimethylpentanoic acid
  VARIANT 4: note = 2-amino-2-(pent-4-en-1-yl)hept-6-enoic acid, stapled with another amino acid residue comprising an olefin group to form a staple through one of the two olefin groups and with another amino acid residue comprising an olefin group to form a staple through the other of the two olefin groups, S configuration
  SITE 6: note = (S)-3-(2-amino-2-carboxyethyl)benzoic acid
  SITE 7: note = 2-amino-2-methylpropanoic acid
  SITE 10: note = L-lysine, stapled with another amino acid residue comprising a side chain acid group to form a staple through the 6-amino group
  SITE 11: note (S)-3-amino-1-((pent-4-en-1-yloxy)carbonyl)pyrrolidine-3-ca rboxylic acid, stapled with another amino acid residue comprising an olefin group to form a staple through the olefin group, E olefin in the staple
  SITE 12: note = (S)-2-amino-3-(o-tolyl)propanoic acid
  SITE 13: note = (S)-2-amino-3-(benzo[b]thiophen-3-yl)propanoic acid
  SITE 14: note = L-glutamic acid, stapled with another amino acid residue comprising a side chain amino group to form a staple through the 4-carboxyl group
  SITE 15: note = C-term amino
XDXXDXXAFKXXXEA

SEQ ID NO: 1587 - protein, 15 aa, synthetic construct
  SITE 1: note = N-term Acetic Acid
  SITE 1: note = (R)-2-allylpyrrolidine-2-carboxylic acid, stapled with another amino acid residue comprising an olefin group to form a staple through the olefin group, Z olefin in the staple
  SITE 3: note = (S)-2-amino-4,4-dimethylpentanoic acid
  VARIANT 4: note = 2-amino-2-(pent-4-en-1-yl)hept-6-enoic acid, stapled with another amino acid residue comprising an olefin group to form a staple through one of the two olefin groups and with another amino acid residue comprising an olefin group to form a staple through the other of the two olefin groups, R configuration
  SITE 6: note = (S)-3-(2-amino-2-carboxyethyl)benzoic acid
  SITE 7: note = 2-amino-2-methylpropanoic acid
  SITE 10: note = L-lysine, stapled with another amino acid residue comprising a side chain acid group to form a staple through the 6-amino group
  SITE 11: note (S)-3-amino-1-((pent-4-en-1-yloxy)carbonyl)pyrrolidine-3-ca rboxylic acid, stapled with another amino acid residue comprising an olefin group to form a staple through the olefin group, E olefin in the staple
  SITE 12: note = (S)-2-amino-3-(o-tolyl)propanoic acid
  SITE 13: note = (S)-2-amino-3-(benzo[b]thiophen-3-yl)propanoic acid
  SITE 14: note = L-glutamic acid, stapled with another amino acid residue comprising a side chain amino group to form a staple through the 4-carboxyl group
  SITE 15: note = C-term amino
XDXXDXXAFKXXXEA

SEQ ID NO: 1588 - protein, 15 aa, synthetic construct
  SITE 1: note = N-term Acetic Acid
  SITE 1: note = (R)-2-allylpyrrolidine-2-carboxylic acid, stapled with another amino acid residue comprising an olefin group to form a staple through the olefin group, Z olefin in the staple
  SITE 3: note = (S)-2-amino-4,4-dimethylpentanoic acid
  VARIANT 4: note = 2-amino-2-(pent-4-en-1-yl)hept-6-enoic acid, stapled with another amino acid residue comprising an olefin group to form a staple through one of the two olefin groups and with another amino acid residue comprising an olefin group to form a staple through the other of the two olefin groups, S configuration
  SITE 6: note = (S)-3-(2-amino-2-carboxyethyl)benzoic acid
  SITE 7: note = 2-amino-2-methylpropanoic acid
  SITE 10: note = L-lysine, stapled with another amino acid residue comprising a side chain acid group to form a staple through the 6-amino group
  SITE 11: note (S)-3-amino-1-((pent-4-en-1-yloxy)carbonyl)pyrrolidine-3-ca rboxylic acid, stapled with another amino acid residue comprising an olefin group to form a staple through the olefin group, E olefin in the staple
  SITE 12: note = (S)-2-amino-3-(o-tolyl)propanoic acid
  SITE 13: note = (S)-2-amino-3-(benzo[b]thiophen-3-yl)propanoic acid
  SITE 14: note = L-glutamic acid, stapled with another amino acid residue comprising a side chain amino group to form a staple through the 4-carboxyl group
  SITE 15: note = C-term amino
XDXXDXXAFKXXXEA

SEQ ID NO: 1589 - protein, 15 aa, synthetic construct
  SITE 1: note = N-term Acetic Acid
  SITE 1: note = (R)-2-allylpyrrolidine-2-carboxylic acid, stapled with another amino acid residue comprising an olefin group to form a staple through the olefin group, Z olefin in the staple
  SITE 3: note = (S)-2-amino-4,4-dimethylpentanoic acid
  VARIANT 4: note = 2-amino-2-(pent-4-en-1-yl)hept-6-enoic acid, stapled with another amino acid residue comprising an olefin group to form a staple through one of the two olefin groups and with another amino acid residue comprising an olefin group to form a staple through the other of the two olefin groups, R configuration
  SITE 6: note = (S)-3-(2-amino-2-carboxyethyl)benzoic acid
  SITE 7: note = 2-amino-2-methylpropanoic acid
  SITE 10: note = L-lysine, stapled with another amino acid residue comprising a side chain acid group to form a staple through the 6-amino group
  SITE 11: note (S)-3-amino-1-((pent-4-en-1-yloxy)carbonyl)pyrrolidine-3-ca rboxylic acid, stapled with another amino acid residue comprising an olefin group to form a staple through the olefin group, Z olefin in the staple
  SITE 12: note = (S)-2-amino-3-(o-tolyl)propanoic acid
  SITE 13: note = (S)-2-amino-3-(benzo[b]thiophen-3-yl)propanoic acid
  SITE 14: note = L-glutamic acid, stapled with another amino acid residue comprising a side chain amino group to form a staple through the 4-carboxyl group
  SITE 15: note = C-term amino
XDXXDXXAFKXXXEA

SEQ ID NO: 1590 - protein, 15 aa, synthetic construct
  SITE 1: note = N-term Acetic Acid
  SITE 1: note = (R)-2-allylpyrrolidine-2-carboxylic acid, stapled with another amino acid residue comprising an olefin group to form a staple through the olefin group, Z olefin in the staple
  SITE 3: note = (S)-2-amino-4,4-dimethylpentanoic acid
  VARIANT 4: note = 2-amino-2-(pent-4-en-1-yl)hept-6-enoic acid, stapled with another amino acid residue comprising an olefin group to form a staple through one of the two olefin groups and with another amino acid residue comprising an olefin group to form a staple through the other of the two olefin groups, S configuration
  SITE 6: note = (S)-3-(2-amino-2-carboxyethyl)benzoic acid
  SITE 7: note = 2-amino-2-methylpropanoic acid
  SITE 10: note = L-lysine, stapled with another amino acid residue comprising a side chain acid group to form a staple through the 6-amino group
  SITE 11: note (S)-3-amino-1-((pent-4-en-1-yloxy)carbonyl)pyrrolidine-3-ca rboxylic acid, stapled with another amino acid residue comprising an olefin group to form a staple through the olefin group, Z olefin in the staple
  SITE 12: note = (S)-2-amino-3-(o-tolyl)propanoic acid
  SITE 13: note = (S)-2-amino-3-(benzo[b]thiophen-3-yl)propanoic acid
  SITE 14: note = L-glutamic acid, stapled with another amino acid residue comprising a side chain amino group to form a staple through the 4-carboxyl group
  SITE 15: note = C-term amino
XDXXDXXAFKXXXEA

SEQ ID NO: 1591 - protein, 15 aa, synthetic construct
  SITE 1: note = N-term Acetic Acid
  SITE 1: note = (R)-2-allylpyrrolidine-2-carboxylic acid, stapled with another amino acid residue comprising an olefin group to form a staple through the olefin group, E olefin in the staple
  SITE 3: note = (S)-2-amino-4,4-dimethylpentanoic acid
  VARIANT 4: note = 2-amino-2-(pent-4-en-1-yl)hept-6-enoic acid, stapled with another amino acid residue comprising an olefin group to form a staple through one of the two olefin groups and with another amino acid residue comprising an olefin group to form a staple through the other of the two olefin groups, R configuration
  SITE 6: note = (S)-3-(2-amino-2-carboxyethyl)benzoic acid
  SITE 7: note = 2-amino-2-methylpropanoic acid
  SITE 10: note = L-lysine, stapled with another amino acid residue comprising a side chain acid group to form a staple through the 6-amino group
  SITE 11: note (S)-3-amino-1-((pent-4-en-1-yloxy)carbonyl)pyrrolidine-3-ca rboxylic acid, stapled with another amino acid residue comprising an olefin group to form a staple through the olefin group, Z olefin in the staple
  SITE 12: note = (S)-2-amino-3-(o-tolyl)propanoic acid
  SITE 13: note = (S)-2-amino-3-(benzo[b]thiophen-3-yl)propanoic acid
  SITE 14: note = L-glutamic acid, stapled with another amino acid residue comprising a side chain amino group to form a staple through the 4-carboxyl group
  SITE 15: note = C-term amino
XDXXDXXAFKXXXEA

SEQ ID NO: 1592 - protein, 15 aa, synthetic construct
  SITE 1: note = N-term Acetic Acid
  SITE 1: note = (R)-2-allylpyrrolidine-2-carboxylic acid, stapled with another amino acid residue comprising an olefin group to form a staple through the olefin group, E olefin in the staple
  SITE 3: note = (S)-2-amino-4,4-dimethylpentanoic acid
  VARIANT 4: note = 2-amino-2-(pent-4-en-1-yl)hept-6-enoic acid, stapled with another amino acid residue comprising an olefin group to form a staple through one of the two olefin groups and with another amino acid residue comprising an olefin group to form a staple through the other of the two olefin groups, S configuration
  SITE 6: note = (S)-3-(2-amino-2-carboxyethyl)benzoic acid
  SITE 7: note = 2-amino-2-methylpropanoic acid
  SITE 10: note = L-lysine, stapled with another amino acid residue comprising a side chain acid group to form a staple through the 6-amino group
  SITE 11: note (S)-3-amino-1-((pent-4-en-1-yloxy)carbonyl)pyrrolidine-3-ca rboxylic acid, stapled with another amino acid residue comprising an olefin group to form a staple through the olefin group, Z olefin in the staple
  SITE 12: note = (S)-2-amino-3-(o-tolyl)propanoic acid
  SITE 13: note = (S)-2-amino-3-(benzo[b]thiophen-3-yl)propanoic acid
  SITE 14: note = L-glutamic acid, stapled with another amino acid residue comprising a side chain amino group to form a staple through the 4-carboxyl group
  SITE 15: note = C-term amino
XDXXDXXAFKXXXEA

SEQ ID NO: 1593 - protein, 15 aa, synthetic construct
  SITE 1: note = N-term Acetic Acid
  SITE 1: note = (R)-2-allylpyrrolidine-2-carboxylic acid, stapled with another amino acid residue comprising an olefin group to form a staple through the olefin group, E olefin in the staple
  SITE 3: note = (S)-2-amino-4,4-dimethylpentanoic acid
  VARIANT 4: note = 2-amino-2-(pent-4-en-1-yl)hept-6-enoic acid, stapled with another amino acid residue comprising an olefin group to form a staple through one of the two olefin groups and with another amino acid residue comprising an olefin group to form a staple through the other of the two olefin groups, R configuration
  SITE 6: note = (S)-3-(2-amino-2-carboxyethyl)benzoic acid
  SITE 7: note = 2-amino-2-methylpropanoic acid
  SITE 10: note = L-lysine, stapled with another amino acid residue comprising a side chain acid group to form a staple through the 6-amino group
  SITE 11: note (S)-3-amino-1-((pent-4-en-1-yloxy)carbonyl)pyrrolidine-3-ca rboxylic acid, stapled with another amino acid residue comprising an olefin group to form a staple through the olefin group, E olefin in the staple
  SITE 12: note = (S)-2-amino-3-(2-bromophenyl)propanoic acid
  SITE 13: note = (S)-2-amino-3-(benzo[b]thiophen-3-yl)propanoic acid
  SITE 14: note = L-glutamic acid, stapled with another amino acid residue comprising a side chain amino group to form a staple through the 4-carboxyl group
  SITE 15: note = C-term amino
XDXXDXXAFKXXXEA

SEQ ID NO: 1594 - protein, 15 aa, synthetic construct
  SITE 1: note = N-term Acetic Acid
  SITE 1: note = (R)-2-allylpyrrolidine-2-carboxylic acid, stapled with another amino acid residue comprising an olefin group to form a staple through the olefin group, E olefin in the staple
  SITE 3: note = (S)-2-amino-4,4-dimethylpentanoic acid
  VARIANT 4: note = 2-amino-2-(pent-4-en-1-yl)hept-6-enoic acid, stapled with another amino acid residue comprising an olefin group to form a staple through one of the two olefin groups and with another amino acid residue comprising an olefin group to form a staple through the other of the two olefin groups, S configuration
  SITE 6: note = (S)-3-(2-amino-2-carboxyethyl)benzoic acid
  SITE 7: note = 2-amino-2-methylpropanoic acid
  SITE 10: note = L-lysine, stapled with another amino acid residue comprising a side chain acid group to form a staple through the 6-amino group
  SITE 11: note (S)-3-amino-1-((pent-4-en-1-yloxy)carbonyl)pyrrolidine-3-ca rboxylic acid, stapled with another amino acid residue comprising an olefin group to form a staple through the olefin group, E olefin in the staple
  SITE 12: note = (S)-2-amino-3-(2-bromophenyl)propanoic acid
  SITE 13: note = (S)-2-amino-3-(benzo[b]thiophen-3-yl)propanoic acid
  SITE 14: note = L-glutamic acid, stapled with another amino acid residue comprising a side chain amino group to form a staple through the 4-carboxyl group
  SITE 15: note = C-term amino
XDXXDXXAFKXXXEA

SEQ ID NO: 1595 - protein, 15 aa, synthetic construct
  SITE 1: note = N-term Acetic Acid
  SITE 1: note = (R)-2-allylpyrrolidine-2-carboxylic acid, stapled with another amino acid residue comprising an olefin group to form a staple through the olefin group, Z olefin in the staple
  SITE 3: note = (S)-2-amino-4,4-dimethylpentanoic acid
  VARIANT 4: note = 2-amino-2-(pent-4-en-1-yl)hept-6-enoic acid, stapled with another amino acid residue comprising an olefin group to form a staple through one of the two olefin groups and with another amino acid residue comprising an olefin group to form a staple through the other of the two olefin groups, R configuration
  SITE 6: note = (S)-3-(2-amino-2-carboxyethyl)benzoic acid
  SITE 7: note = 2-amino-2-methylpropanoic acid
  SITE 10: note = L-lysine, stapled with another amino acid residue comprising a side chain acid group to form a staple through the 6-amino group
  SITE 11: note (S)-3-amino-1-((pent-4-en-1-yloxy)carbonyl)pyrrolidine-3-ca rboxylic acid, stapled with another amino acid residue comprising an olefin group to form a staple through the olefin group, E olefin in the staple
  SITE 12: note = (S)-2-amino-3-(2-bromophenyl)propanoic acid
  SITE 13: note = (S)-2-amino-3-(benzo[b]thiophen-3-yl)propanoic acid
  SITE 14: note = L-glutamic acid, stapled with another amino acid residue comprising a side chain amino group to form a staple through the 4-carboxyl group
  SITE 15: note = C-term amino
XDXXDXXAFKXXXEA

SEQ ID NO: 1596 - protein, 15 aa, synthetic construct
  SITE 1: note = N-term Acetic Acid
  SITE 1: note = (R)-2-allylpyrrolidine-2-carboxylic acid, stapled with another amino acid residue comprising an olefin group to form a staple through the olefin group, Z olefin in the staple
  SITE 3: note = (S)-2-amino-4,4-dimethylpentanoic acid
  VARIANT 4: note = 2-amino-2-(pent-4-en-1-yl)hept-6-enoic acid, stapled with another amino acid residue comprising an olefin group to form a staple through one of the two olefin groups and with another amino acid residue comprising an olefin group to form a staple through the other of the two olefin groups, S configuration
  SITE 6: note = (S)-3-(2-amino-2-carboxyethyl)benzoic acid
  SITE 7: note = 2-amino-2-methylpropanoic acid
  SITE 10: note = L-lysine, stapled with another amino acid residue comprising a side chain acid group to form a staple through the 6-amino group
  SITE 11: note (S)-3-amino-1-((pent-4-en-1-yloxy)carbonyl)pyrrolidine-3-ca rboxylic acid, stapled with another amino acid residue comprising an olefin group to form a staple through the olefin group, E olefin in the staple
  SITE 12: note = (S)-2-amino-3-(2-bromophenyl)propanoic acid
  SITE 13: note = (S)-2-amino-3-(benzo[b]thiophen-3-yl)propanoic acid
  SITE 14: note = L-glutamic acid, stapled with another amino acid residue comprising a side chain amino group to form a staple through the 4-carboxyl group
  SITE 15: note = C-term amino
XDXXDXXAFKXXXEA

SEQ ID NO: 1597 - protein, 15 aa, synthetic construct
  SITE 1: note = N-term Acetic Acid
  SITE 1: note = (R)-2-allylpyrrolidine-2-carboxylic acid, stapled with another amino acid residue comprising an olefin group to form a staple through the olefin group, Z olefin in the staple
  SITE 3: note = (S)-2-amino-4,4-dimethylpentanoic acid
  VARIANT 4: note = 2-amino-2-(pent-4-en-1-yl)hept-6-enoic acid, stapled with another amino acid residue comprising an olefin group to form a staple through one of the two olefin groups and with another amino acid residue comprising an olefin group to form a staple through the other of the two olefin groups, R configuration
  SITE 6: note = (S)-3-(2-amino-2-carboxyethyl)benzoic acid
  SITE 7: note = 2-amino-2-methylpropanoic acid
  SITE 10: note = L-lysine, stapled with another amino acid residue comprising a side chain acid group to form a staple through the 6-amino group
  SITE 11: note (S)-3-amino-1-((pent-4-en-1-yloxy)carbonyl)pyrrolidine-3-ca rboxylic acid, stapled with another amino acid residue comprising an olefin group to form a staple through the olefin group, Z olefin in the staple
  SITE 12: note = (S)-2-amino-3-(2-bromophenyl)propanoic acid
  SITE 13: note = (S)-2-amino-3-(benzo[b]thiophen-3-yl)propanoic acid
  SITE 14: note = L-glutamic acid, stapled with another amino acid residue comprising a side chain amino group to form a staple through the 4-carboxyl group
  SITE 15: note = C-term amino
XDXXDXXAFKXXXEA

SEQ ID NO: 1598 - protein, 15 aa, synthetic construct
  SITE 1: note = N-term Acetic Acid
  SITE 1: note = (R)-2-allylpyrrolidine-2-carboxylic acid, stapled with another amino acid residue comprising an olefin group to form a staple through the olefin group, Z olefin in the staple
  SITE 3: note = (S)-2-amino-4,4-dimethylpentanoic acid
  VARIANT 4: note = 2-amino-2-(pent-4-en-1-yl)hept-6-enoic acid, stapled with another amino acid residue comprising an olefin group to form a staple through one of the two olefin groups and with another amino acid residue comprising an olefin group to form a staple through the other of the two olefin groups, S configuration
  SITE 6: note = (S)-3-(2-amino-2-carboxyethyl)benzoic acid
  SITE 7: note = 2-amino-2-methylpropanoic acid
  SITE 10: note = L-lysine, stapled with another amino acid residue comprising a side chain acid group to form a staple through the 6-amino group
  SITE 11: note (S)-3-amino-1-((pent-4-en-1-yloxy)carbonyl)pyrrolidine-3-ca rboxylic acid, stapled with another amino acid residue comprising an olefin group to form a staple through the olefin group, Z olefin in the staple
  SITE 12: note = (S)-2-amino-3-(2-bromophenyl)propanoic acid
  SITE 13: note = (S)-2-amino-3-(benzo[b]thiophen-3-yl)propanoic acid
  SITE 14: note = L-glutamic acid, stapled with another amino acid residue comprising a side chain amino group to form a staple through the 4-carboxyl group
  SITE 15: note = C-term amino
XDXXDXXAFKXXXEA

SEQ ID NO: 1599 - protein, 15 aa, synthetic construct
  SITE 1: note = N-term Acetic Acid
  SITE 1: note = (R)-2-allylpyrrolidine-2-carboxylic acid, stapled with another amino acid residue comprising an olefin group to form a staple through the olefin group, E olefin in the staple
  SITE 3: note = (S)-2-amino-4,4-dimethylpentanoic acid
  VARIANT 4: note = 2-amino-2-(pent-4-en-1-yl)hept-6-enoic acid, stapled with another amino acid residue comprising an olefin group to form a staple through one of the two olefin groups and with another amino acid residue comprising an olefin group to form a staple through the other of the two olefin groups, R configuration
  SITE 6: note = (S)-3-(2-amino-2-carboxyethyl)benzoic acid
  SITE 7: note = 2-amino-2-methylpropanoic acid
  SITE 10: note = L-lysine, stapled with another amino acid residue comprising a side chain acid group to form a staple through the 6-amino group
  SITE 11: note (S)-3-amino-1-((pent-4-en-1-yloxy)carbonyl)pyrrolidine-3-ca rboxylic acid, stapled with another amino acid residue comprising an olefin group to form a staple through the olefin group, Z olefin in the staple
  SITE 12: note = (S)-2-amino-3-(2-bromophenyl)propanoic acid
  SITE 13: note = (S)-2-amino-3-(benzo[b]thiophen-3-yl)propanoic acid
  SITE 14: note = L-glutamic acid, stapled with another amino acid residue comprising a side chain amino group to form a staple through the 4-carboxyl group
  SITE 15: note = C-term amino
XDXXDXXAFKXXXEA

SEQ ID NO: 1600 - protein, 15 aa, synthetic construct
  SITE 1: note = N-term Acetic Acid
  SITE 1: note = (R)-2-allylpyrrolidine-2-carboxylic acid, stapled with another amino acid residue comprising an olefin group to form a staple through the olefin group, E olefin in the staple
  SITE 3: note = (S)-2-amino-4,4-dimethylpentanoic acid
  VARIANT 4: note = 2-amino-2-(pent-4-en-1-yl)hept-6-enoic acid, stapled with another amino acid residue comprising an olefin group to form a staple through one of the two olefin groups and with another amino acid residue comprising an olefin group to form a staple through the other of the two olefin groups, S configuration
  SITE 6: note = (S)-3-(2-amino-2-carboxyethyl)benzoic acid
  SITE 7: note = 2-amino-2-methylpropanoic acid
  SITE 10: note = L-lysine, stapled with another amino acid residue comprising a side chain acid group to form a staple through the 6-amino group
  SITE 11: note (S)-3-amino-1-((pent-4-en-1-yloxy)carbonyl)pyrrolidine-3-ca rboxylic acid, stapled with another amino acid residue comprising an olefin group to form a staple through the olefin group, Z olefin in the staple
  SITE 12: note = (S)-2-amino-3-(2-bromophenyl)propanoic acid
  SITE 13: note = (S)-2-amino-3-(benzo[b]thiophen-3-yl)propanoic acid
  SITE 14: note = L-glutamic acid, stapled with another amino acid residue comprising a side chain amino group to form a staple through the 4-carboxyl group
  SITE 15: note = C-term amino
XDXXDXXAFKXXXEA

SEQ ID NO: 1601 - protein, 15 aa, synthetic construct
  SITE 1: note = N-term Acetic Acid
  SITE 1: note = (R)-2-allylpyrrolidine-2-carboxylic acid, stapled with another amino acid residue comprising an olefin group to form a staple through the olefin group, Z olefin in the staple
  SITE 3: note = (S)-2-amino-4,4-dimethylpentanoic acid
  VARIANT 4: note = 2-amino-2-(pent-4-en-1-yl)hept-6-enoic acid, stapled with another amino acid residue comprising an olefin group to form a staple through one of the two olefin groups and with another amino acid residue comprising an olefin group to form a staple through the other of the two olefin groups, S configuration
  SITE 6: note = (S)-3-(2-amino-2-carboxyethyl)benzoic acid
  SITE 7: note = 2-amino-2-methylpropanoic acid
  SITE 10: note = (S)-2-amino-6-(1H-1,2,3-triazol-1-yl)hexanoic acid, stapled with another amino acid residue to form a staple through the 4-position of the triazolyl group
  SITE 11: note (S)-3-amino-1-((pent-4-en-1-yloxy)carbonyl)pyrrolidine-3-ca rboxylic acid, stapled with another amino acid residue comprising an olefin group to form a staple through the olefin group, E olefin in the staple
  SITE 12: note = (S)-2-amino-3-(thiophen-3-yl)propanoic acid
  SITE 13: note = (S)-2-amino-3-(benzo[b]thiophen-3-yl)propanoic acid
  SITE 14: note = L-alanine, stapled with another amino acid residue comprising a triazolyl group to form a staple through the terminal methyl group
  SITE 15: note = C-term amino
XDXXDXXAFXXXXAA

SEQ ID NO: 1602 - protein, 15 aa, synthetic construct
  SITE 1: note = N-term Acetic Acid
  SITE 1: note = (R)-2-allylpyrrolidine-2-carboxylic acid, stapled with another amino acid residue comprising an olefin group to form a staple through the olefin group, Z olefin in the staple
  SITE 3: note = (S)-2-amino-4,4-dimethylpentanoic acid
  VARIANT 4: note = 2-amino-2-(pent-4-en-1-yl)hept-6-enoic acid, stapled with another amino acid residue comprising an olefin group to form a staple through one of the two olefin groups and with another amino acid residue comprising an olefin group to form a staple through the other of the two olefin groups, R configuration
  SITE 6: note = (S)-3-(2-amino-2-carboxyethyl)benzoic acid
  SITE 7: note = 2-amino-2-methylpropanoic acid
  SITE 10: note = (S)-2-amino-6-(1H-1,2,3-triazol-1-yl)hexanoic acid, stapled with another amino acid residue to form a staple through the 4-position of the triazolyl group
  SITE 11: note (S)-3-amino-1-((pent-4-en-1-yloxy)carbonyl)pyrrolidine-3-ca rboxylic acid, stapled with another amino acid residue comprising an olefin group to form a staple through the olefin group, E olefin in the staple
  SITE 12: note = (S)-2-amino-3-(thiophen-3-yl)propanoic acid
  SITE 13: note = (S)-2-amino-3-(benzo[b]thiophen-3-yl)propanoic acid
  SITE 14: note = L-alanine, stapled with another amino acid residue comprising a triazolyl group to form a staple through the terminal methyl group
  SITE 15: note = C-term amino
XDXXDXXAFXXXXAA

SEQ ID NO: 1603 - protein, 15 aa, synthetic construct
  SITE 1: note = N-term Acetic Acid
  SITE 1: note = (R)-2-allylpyrrolidine-2-carboxylic acid, stapled with another amino acid residue comprising an olefin group to form a staple through the olefin group, E olefin in the staple
  SITE 3: note = (S)-2-amino-4,4-dimethylpentanoic acid
  VARIANT 4: note = 2-amino-2-(pent-4-en-1-yl)hept-6-enoic acid, stapled with another amino acid residue comprising an olefin group to form a staple through one of the two olefin groups and with another amino acid residue comprising an olefin group to form a staple through the other of the two olefin groups, S configuration
  SITE 6: note = (S)-3-(2-amino-2-carboxyethyl)benzoic acid
  SITE 7: note = 2-amino-2-methylpropanoic acid
  SITE 10: note = (S)-2-amino-6-(1H-1,2,3-triazol-1-yl)hexanoic acid, stapled with another amino acid residue to form a staple through the 4-position of the triazolyl group
  SITE 11: note (S)-3-amino-1-((pent-4-en-1-yloxy)carbonyl)pyrrolidine-3-ca rboxylic acid, stapled with another amino acid residue comprising an olefin group to form a staple through the olefin group, E olefin in the staple
  SITE 12: note = (S)-2-amino-3-(thiophen-3-yl)propanoic acid
  SITE 13: note = (S)-2-amino-3-(benzo[b]thiophen-3-yl)propanoic acid
  SITE 14: note = L-alanine, stapled with another amino acid residue comprising a triazolyl group to form a staple through the terminal methyl group
  SITE 15: note = C-term amino
XDXXDXXAFXXXXAA

SEQ ID NO: 1604 - protein, 15 aa, synthetic construct
  SITE 1: note = N-term Acetic Acid
  SITE 1: note = (R)-2-allylpyrrolidine-2-carboxylic acid, stapled with another amino acid residue comprising an olefin group to form a staple through the olefin group, E olefin in the staple
  SITE 3: note = (S)-2-amino-4,4-dimethylpentanoic acid
  VARIANT 4: note = 2-amino-2-(pent-4-en-1-yl)hept-6-enoic acid, stapled with another amino acid residue comprising an olefin group to form a staple through one of the two olefin groups and with another amino acid residue comprising an olefin group to form a staple through the other of the two olefin groups, R configuration
  SITE 6: note = (S)-3-(2-amino-2-carboxyethyl)benzoic acid
  SITE 7: note = 2-amino-2-methylpropanoic acid
  SITE 10: note = (S)-2-amino-6-(1H-1,2,3-triazol-1-yl)hexanoic acid, stapled with another amino acid residue to form a staple through the 4-position of the triazolyl group
  SITE 11: note (S)-3-amino-1-((pent-4-en-1-yloxy)carbonyl)pyrrolidine-3-ca rboxylic acid, stapled with another amino acid residue comprising an olefin group to form a staple through the olefin group, E olefin in the staple
  SITE 12: note = (S)-2-amino-3-(thiophen-3-yl)propanoic acid
  SITE 13: note = (S)-2-amino-3-(benzo[b]thiophen-3-yl)propanoic acid
  SITE 14: note = L-alanine, stapled with another amino acid residue comprising a triazolyl group to form a staple through the terminal methyl group
  SITE 15: note = C-term amino
XDXXDXXAFXXXXAA

SEQ ID NO: 1605 - protein, 15 aa, synthetic construct
  SITE 1: note = N-term Acetic Acid
  SITE 1: note = (R)-2-allylpyrrolidine-2-carboxylic acid, stapled with another amino acid residue comprising an olefin group to form a staple through the olefin group, E olefin in the staple
  SITE 3: note = (S)-2-amino-4,4-dimethylpentanoic acid
  VARIANT 4: note = 2-amino-2-(pent-4-en-1-yl)hept-6-enoic acid, stapled with another amino acid residue comprising an olefin group to form a staple through one of the two olefin groups and with another amino acid residue comprising an olefin group to form a staple through the other of the two olefin groups, S configuration
  SITE 6: note = (S)-3-(2-amino-2-carboxyethyl)benzoic acid
  SITE 7: note = 2-amino-2-methylpropanoic acid
  SITE 10: note = (S)-2-amino-6-(1H-1,2,3-triazol-1-yl)hexanoic acid, stapled with another amino acid residue to form a staple through the 4-position of the triazolyl group
  SITE 11: note (S)-3-amino-1-((pent-4-en-1-yloxy)carbonyl)pyrrolidine-3-ca rboxylic acid, stapled with another amino acid residue comprising an olefin group to form a staple through the olefin group, Z olefin in the staple
  SITE 12: note = (S)-2-amino-3-(thiophen-3-yl)propanoic acid
  SITE 13: note = (S)-2-amino-3-(benzo[b]thiophen-3-yl)propanoic acid
  SITE 14: note = L-alanine, stapled with another amino acid residue comprising a triazolyl group to form a staple through the terminal methyl group
  SITE 15: note = C-term amino
XDXXDXXAFXXXXAA

SEQ ID NO: 1606 - protein, 15 aa, synthetic construct
  SITE 1: note = N-term Acetic Acid
  SITE 1: note = (R)-2-allylpyrrolidine-2-carboxylic acid, stapled with another amino acid residue comprising an olefin group to form a staple through the olefin group, E olefin in the staple
  SITE 3: note = (S)-2-amino-4,4-dimethylpentanoic acid
  VARIANT 4: note = 2-amino-2-(pent-4-en-1-yl)hept-6-enoic acid, stapled with another amino acid residue comprising an olefin group to form a staple through one of the two olefin groups and with another amino acid residue comprising an olefin group to form a staple through the other of the two olefin groups, R configuration
  SITE 6: note = (S)-3-(2-amino-2-carboxyethyl)benzoic acid
  SITE 7: note = 2-amino-2-methylpropanoic acid
  SITE 10: note = (S)-2-amino-6-(1H-1,2,3-triazol-1-yl)hexanoic acid, stapled with another amino acid residue to form a staple through the 4-position of the triazolyl group
  SITE 11: note (S)-3-amino-1-((pent-4-en-1-yloxy)carbonyl)pyrrolidine-3-ca rboxylic acid, stapled with another amino acid residue comprising an olefin group to form a staple through the olefin group, Z olefin in the staple
  SITE 12: note = (S)-2-amino-3-(thiophen-3-yl)propanoic acid
  SITE 13: note = (S)-2-amino-3-(benzo[b]thiophen-3-yl)propanoic acid
  SITE 14: note = L-alanine, stapled with another amino acid residue comprising a triazolyl group to form a staple through the terminal methyl group
  SITE 15: note = C-term amino
XDXXDXXAFXXXXAA

SEQ ID NO: 1607 - protein, 15 aa, synthetic construct
  SITE 1: note = N-term Acetic Acid
  SITE 1: note = (R)-2-allylpyrrolidine-2-carboxylic acid, stapled with another amino acid residue comprising an olefin group to form a staple through the olefin group, Z olefin in the staple
  SITE 3: note = (S)-2-amino-4,4-dimethylpentanoic acid
  VARIANT 4: note = 2-amino-2-(pent-4-en-1-yl)hept-6-enoic acid, stapled with another amino acid residue comprising an olefin group to form a staple through one of the two olefin groups and with another amino acid residue comprising an olefin group to form a staple through the other of the two olefin groups, S configuration
  SITE 6: note = (S)-3-(2-amino-2-carboxyethyl)benzoic acid
  SITE 7: note = 2-amino-2-methylpropanoic acid
  SITE 10: note = (S)-2-amino-6-(1H-1,2,3-triazol-1-yl)hexanoic acid, stapled with another amino acid residue to form a staple through the 4-position of the triazolyl group
  SITE 11: note (S)-3-amino-1-((pent-4-en-1-yloxy)carbonyl)pyrrolidine-3-ca rboxylic acid, stapled with another amino acid residue comprising an olefin group to form a staple through the olefin group, Z olefin in the staple
  SITE 12: note = (S)-2-amino-3-(thiophen-3-yl)propanoic acid
  SITE 13: note = (S)-2-amino-3-(benzo[b]thiophen-3-yl)propanoic acid
  SITE 14: note = L-alanine, stapled with another amino acid residue comprising a triazolyl group to form a staple through the terminal methyl group
  SITE 15: note = C-term amino
XDXXDXXAFXXXXAA

SEQ ID NO: 1608 - protein, 15 aa, synthetic construct
  SITE 1: note = N-term Acetic Acid
  SITE 1: note = (R)-2-allylpyrrolidine-2-carboxylic acid, stapled with another amino acid residue comprising an olefin group to form a staple through the olefin group, Z olefin in the staple
  SITE 3: note = (S)-2-amino-4,4-dimethylpentanoic acid
  VARIANT 4: note = 2-amino-2-(pent-4-en-1-yl)hept-6-enoic acid, stapled with another amino acid residue comprising an olefin group to form a staple through one of the two olefin groups and with another amino acid residue comprising an olefin group to form a staple through the other of the two olefin groups, R configuration
  SITE 6: note = (S)-3-(2-amino-2-carboxyethyl)benzoic acid
  SITE 7: note = 2-amino-2-methylpropanoic acid
  SITE 10: note = (S)-2-amino-6-(1H-1,2,3-triazol-1-yl)hexanoic acid, stapled with another amino acid residue to form a staple through the 4-position of the triazolyl group
  SITE 11: note (S)-3-amino-1-((pent-4-en-1-yloxy)carbonyl)pyrrolidine-3-ca rboxylic acid, stapled with another amino acid residue comprising an olefin group to form a staple through the olefin group, Z olefin in the staple
  SITE 12: note = (S)-2-amino-3-(thiophen-3-yl)propanoic acid
  SITE 13: note = (S)-2-amino-3-(benzo[b]thiophen-3-yl)propanoic acid
  SITE 14: note = L-alanine, stapled with another amino acid residue comprising a triazolyl group to form a staple through the terminal methyl group
  SITE 15: note = C-term amino
XDXXDXXAFXXXXAA

SEQ ID NO: 1609 - protein, 15 aa, synthetic construct
  SITE 1: note = N-term Acetic Acid
  SITE 1: note = (R)-2-allylpyrrolidine-2-carboxylic acid, stapled with another amino acid residue comprising an olefin group to form a staple through the olefin group, E olefin in the staple
  SITE 3: note = (S)-2-amino-4,4-dimethylpentanoic acid
  VARIANT 4: note = 2-amino-2-(pent-4-en-1-yl)hept-6-enoic acid, stapled with another amino acid residue comprising an olefin group to form a staple through one of the two olefin groups and with another amino acid residue comprising an olefin group to form a staple through the other of the two olefin groups, S configuration
  SITE 6: note = (S)-3-(2-amino-2-carboxyethyl)benzoic acid
  SITE 7: note = 2-amino-2-methylpropanoic acid
  SITE 9: note = (S)-2-amino-3-(thiophen-3-yl)propanoic acid
  SITE 10: note = L-lysine, stapled with another amino acid residue comprising a side chain acid group to form a staple through the 6-amino group
  SITE 11: note (S)-3-amino-1-((pent-4-en-1-yloxy)carbonyl)pyrrolidine-3-ca rboxylic acid, stapled with another amino acid residue comprising an olefin group to form a staple through the olefin group, E olefin in the staple
  SITE 12: note = (S)-2-amino-3-(thiophen-3-yl)propanoic acid
  SITE 13: note = (S)-2-amino-3-(benzo[b]thiophen-3-yl)propanoic acid
  SITE 14: note = L-glutamic acid, stapled with another amino acid residue comprising a side chain amino group to form a staple through the 4-carboxyl group
  SITE 15: note = C-term amino
XDXXDXXAXKXXXEA

SEQ ID NO: 1610 - protein, 15 aa, synthetic construct
  SITE 1: note = N-term Acetic Acid
  SITE 1: note = (R)-2-allylpyrrolidine-2-carboxylic acid, stapled with another amino acid residue comprising an olefin group to form a staple through the olefin group, Z olefin in the staple
  SITE 3: note = (S)-2-amino-4,4-dimethylpentanoic acid
  VARIANT 4: note = 2-amino-2-(pent-4-en-1-yl)hept-6-enoic acid, stapled with another amino acid residue comprising an olefin group to form a staple through one of the two olefin groups and with another amino acid residue comprising an olefin group to form a staple through the other of the two olefin groups, R configuration
  SITE 6: note = (S)-3-(2-amino-2-carboxyethyl)benzoic acid
  SITE 7: note = 2-amino-2-methylpropanoic acid
  SITE 9: note = (S)-2-amino-3-(thiophen-3-yl)propanoic acid
  SITE 10: note = L-lysine, stapled with another amino acid residue comprising a side chain acid group to form a staple through the 6-amino group
  SITE 11: note (S)-3-amino-1-((pent-4-en-1-yloxy)carbonyl)pyrrolidine-3-ca rboxylic acid, stapled with another amino acid residue comprising an olefin group to form a staple through the olefin group, E olefin in the staple
  SITE 12: note = (S)-2-amino-3-(thiophen-3-yl)propanoic acid
  SITE 13: note = (S)-2-amino-3-(benzo[b]thiophen-3-yl)propanoic acid
  SITE 14: note = L-glutamic acid, stapled with another amino acid residue comprising a side chain amino group to form a staple through the 4-carboxyl group
  SITE 15: note = C-term amino
XDXXDXXAXKXXXEA

SEQ ID NO: 1611 - protein, 15 aa, synthetic construct
  SITE 1: note = N-term Acetic Acid
  SITE 1: note = (R)-2-allylpyrrolidine-2-carboxylic acid, stapled with another amino acid residue comprising an olefin group to form a staple through the olefin group, Z olefin in the staple
  SITE 3: note = (S)-2-amino-4,4-dimethylpentanoic acid
  VARIANT 4: note = 2-amino-2-(pent-4-en-1-yl)hept-6-enoic acid, stapled with another amino acid residue comprising an olefin group to form a staple through one of the two olefin groups and with another amino acid residue comprising an olefin group to form a staple through the other of the two olefin groups, S configuration
  SITE 6: note = (S)-3-(2-amino-2-carboxyethyl)benzoic acid
  SITE 7: note = 1-aminocyclopentane-1-carboxylic acid
  SITE 10: note = L-lysine, stapled with another amino acid residue comprising a side chain acid group to form a staple through the 6-amino group
  SITE 11: note (S)-3-amino-1-((pent-4-en-1-yloxy)carbonyl)pyrrolidine-3-ca rboxylic acid, stapled with another amino acid residue comprising an olefin group to form a staple through the olefin group, E olefin in the staple
  SITE 12: note = (S)-2-amino-3-(thiophen-3-yl)propanoic acid
  SITE 13: note = (S)-2-amino-3-(benzo[b]thiophen-3-yl)propanoic acid
  SITE 14: note = L-glutamic acid, stapled with another amino acid residue comprising a side chain amino group to form a staple through the 4-carboxyl group
  SITE 15: note = C-term amino
XDXXDXXAFKXXXEA

SEQ ID NO: 1612 - protein, 15 aa, synthetic construct
  SITE 1: note = N-term Acetic Acid
  SITE 1: note = (R)-2-allylpyrrolidine-2-carboxylic acid, stapled with another amino acid residue comprising an olefin group to form a staple through the olefin group, Z olefin in the staple
  SITE 3: note = (S)-2-amino-4,4-dimethylpentanoic acid
  VARIANT 4: note = 2-amino-2-(pent-4-en-1-yl)hept-6-enoic acid, stapled with another amino acid residue comprising an olefin group to form a staple through one of the two olefin groups and with another amino acid residue comprising an olefin group to form a staple through the other of the two olefin groups, R configuration
  SITE 6: note = (S)-3-(2-amino-2-carboxyethyl)benzoic acid
  SITE 7: note = 1-aminocyclopentane-1-carboxylic acid
  SITE 10: note = L-lysine, stapled with another amino acid residue comprising a side chain acid group to form a staple through the 6-amino group
  SITE 11: note (S)-3-amino-1-((pent-4-en-1-yloxy)carbonyl)pyrrolidine-3-ca rboxylic acid, stapled with another amino acid residue comprising an olefin group to form a staple through the olefin group, Z olefin in the staple
  SITE 12: note = (S)-2-amino-3-(thiophen-3-yl)propanoic acid
  SITE 13: note = (S)-2-amino-3-(benzo[b]thiophen-3-yl)propanoic acid
  SITE 14: note = L-glutamic acid, stapled with another amino acid residue comprising a side chain amino group to form a staple through the 4-carboxyl group
  SITE 15: note = C-term amino
XDXXDXXAFKXXXEA

SEQ ID NO: 1613 - protein, 15 aa, synthetic construct
  SITE 1: note = N-term Acetic Acid
  SITE 1: note = (R)-2-allylpyrrolidine-2-carboxylic acid, stapled with another amino acid residue comprising an olefin group to form a staple through the olefin group, Z olefin in the staple
  SITE 3: note = (S)-2-amino-4,4-dimethylpentanoic acid
  VARIANT 4: note = 2-amino-2-(pent-4-en-1-yl)hept-6-enoic acid, stapled with another amino acid residue comprising an olefin group to form a staple through one of the two olefin groups and with another amino acid residue comprising an olefin group to form a staple through the other of the two olefin groups, S configuration
  SITE 6: note = (S)-3-(2-amino-2-carboxyethyl)benzoic acid
  SITE 7: note = 2-amino-2-methylpropanoic acid
  SITE 10: note = L-lysine, stapled with another amino acid residue comprising a side chain acid group to form a staple through the 6-amino group
  SITE 11: note (S)-3-amino-1-((pent-4-en-1-yloxy)carbonyl)pyrrolidine-3-ca rboxylic acid, stapled with another amino acid residue comprising an olefin group to form a staple through the olefin group
  SITE 12: note = (S)-2-amino-3-(thiophen-3-yl)propanoic acid
  SITE 13: note = (S)-2-amino-3-(benzo[b]thiophen-3-yl)propanoic acid
  SITE 14: note = L-glutamic acid, stapled with another amino acid residue comprising a side chain amino group to form a staple through the 4-carboxyl group
  SITE 15: note = C-term amino
XEXXEXXAFKXXXEA

SEQ ID NO: 1614 - protein, 15 aa, synthetic construct
  SITE 1: note = N-term Acetic Acid
  SITE 1: note = (R)-2-allylpyrrolidine-2-carboxylic acid, stapled with another amino acid residue comprising an olefin group to form a staple through the olefin group
  SITE 3: note = (S)-2-amino-4,4-dimethylpentanoic acid
  VARIANT 4: note = 2-amino-2-(pent-4-en-1-yl)hept-6-enoic acid, stapled with another amino acid residue comprising an olefin group to form a staple through one of the two olefin groups and with another amino acid residue comprising an olefin group to form a staple through the other of the two olefin groups
  SITE 6: note = (S)-3-(2-amino-2-carboxyethyl)benzoic acid
  SITE 7: note = 2-amino-2-methylpropanoic acid
  SITE 10: note = (S)-2-amino-6-(1H-1,2,3-triazol-1-yl)hexanoic acid, useful for stapling/stapled with another amino acid residue to form a staple through the 4-position of the triazolyl group
  SITE 11: note (S)-3-amino-1-((pent-4-en-1-yloxy)carbonyl)pyrrolidine-3-ca rboxylic acid, stapled with another amino acid residue comprising an olefin group to form a staple through the olefin group
  SITE 12: note = (S)-2-amino-3-(thiophen-3-yl)propanoic acid
  SITE 13: note = (S)-2-amino-3-(benzo[b]thiophen-3-yl)propanoic acid
  SITE 14: note = O-methyl-L-serine, useful for stapling/stapled with another amino acid residue comprising a triazolyl group to form a staple through the terminal methyl group
  SITE 15: note = C-term amino
XDXXDXXAFXXXXSA

SEQ ID NO: 1615 - protein, 14 aa, synthetic construct
  SITE 1: note = N-term Acetic Acid
  SITE 1: note = (R)-2-allylpyrrolidine-2-carboxylic acid, stapled with another amino acid residue comprising an olefin group to form a staple through the olefin group
  SITE 3: note = (S)-2-amino-4,4-dimethylpentanoic acid
  VARIANT 4: note = 2-amino-2-(pent-4-en-1-yl)hept-6-enoic acid, stapled with another amino acid residue comprising an olefin group to form a staple through one of the two olefin groups and with another amino acid residue comprising an olefin group to form a staple through the other of the two olefin groups
  SITE 6: note = (S)-3-(2-amino-2-carboxyethyl)benzoic acid
  SITE 7: note = (S)-2-amino-6-(1H-1,2,3-triazol-1-yl)hexanoic acid; stapled with another amino acid residue to form a staple through the 4-position of the triazolyl group
  SITE 10: note = L-alanine; stapled with another amino acid residue comprising a triazolyl group to form a staple through the terminal methyl group
  SITE 11: note (S)-3-amino-1-((pent-4-en-1-yloxy)carbonyl)pyrrolidine-3-ca rboxylic acid, stapled with another amino acid residue comprising an olefin group to form a staple through the olefin group
  SITE 12: note = (S)-2-amino-3-(thiophen-3-yl)propanoic acid
  SITE 13: note = (S)-2-amino-3-(benzo[b]thiophen-3-yl)propanoic acid
  SITE 14: note = C-term amino
XDXXDXXAFAXXXQ

SEQ ID NO: 1616 - protein, 14 aa, synthetic construct
  SITE 1: note = N-term Acetic Acid
  SITE 1: note = (R)-2-allylpyrrolidine-2-carboxylic acid, stapled with another amino acid residue comprising an olefin group to form a staple through the olefin group
  SITE 3: note = (S)-2-amino-4,4-dimethylpentanoic acid
  VARIANT 4: note = 2-amino-2-(pent-4-en-1-yl)hept-6-enoic acid, stapled with another amino acid residue comprising an olefin group to form a staple through one of the two olefin groups and with another amino acid residue comprising an olefin group to form a staple through the other of the two olefin groups
  SITE 6: note = (S)-3-(2-amino-2-carboxyethyl)benzoic acid
  SITE 10: note = L-lysine, stapled with another amino acid residue comprising a side chain acid group to form a staple through the 6-amino group
  SITE 11: note (S)-3-amino-1-((pent-4-en-1-yloxy)carbonyl)pyrrolidine-3-ca rboxylic acid, stapled with another amino acid residue comprising an olefin group to form a staple through the olefin group
  SITE 12: note = (S)-2-amino-3-(thiophen-3-yl)propanoic acid
  SITE 13: note = (S)-2-amino-3-(benzo[b]thiophen-3-yl)propanoic acid
  SITE 14: note = L-glutamic acid, stapled with another amino acid residue comprising a side chain amino group to form a staple through the 4-carboxyl group
  SITE 14: note = C-term amino
XDXXDXAAFKXXXE

SEQ ID NO: 1617 - protein, 15 aa, synthetic construct
  SITE 1: note = N-term Acetic Acid
  SITE 1: note = (R)-2-allylpyrrolidine-2-carboxylic acid, stapled with another amino acid residue comprising an olefin group to form a staple through the olefin group
  SITE 3: note = (S)-2-amino-4,4-dimethylpentanoic acid
  VARIANT 4: note = 2-amino-2-(pent-4-en-1-yl)hept-6-enoic acid, stapled with another amino acid residue comprising an olefin group to form a staple through one of the two olefin groups and with another amino acid residue comprising an olefin group to form a staple through the other of the two olefin groups
  SITE 6: note = (S)-3-(2-amino-2-carboxyethyl)benzoic acid
  SITE 7: note = 2-amino-2-methylpropanoic acid
  SITE 10: note = L-lysine, stapled with another amino acid residue comprising a side chain acid group to form a staple through the 6-amino group
  SITE 11: note (S)-3-amino-1-((pent-4-en-1-yloxy)carbonyl)pyrrolidine-3-ca rboxylic acid, stapled with another amino acid residue comprising an olefin group to form a staple through the olefin group
  SITE 12: note = (S)-2-amino-3-(thiophen-3-yl)propanoic acid
  SITE 13: note = (S)-2-amino-3-(benzo[b]thiophen-3-yl)propanoic acid
  SITE 14: note = L-glutamic acid, stapled with another amino acid residue comprising a side chain amino group to form a staple through the 4-carboxyl group
  SITE 15: note = C-term amino
XDXXDXXAFKXXXEA

SEQ ID NO: 1618 - protein, 15 aa, synthetic construct
  SITE 1: note = N-term Acetic Acid
  SITE 1: note = (R)-2-allylpyrrolidine-2-carboxylic acid, stapled with another amino acid residue comprising an olefin group to form a staple through the olefin group
  SITE 3: note = (S)-2-amino-4,4-dimethylpentanoic acid
  VARIANT 4: note = 2-amino-2-(pent-4-en-1-yl)hept-6-enoic acid, stapled with another amino acid residue comprising an olefin group to form a staple through one of the two olefin groups and with another amino acid residue comprising an olefin group to form a staple through the other of the two olefin groups
  SITE 6: note = (S)-3-(2-amino-2-carboxyethyl)benzoic acid
  SITE 7: note = 2-amino-2-methylpropanoic acid
  SITE 10: note = L-lysine, stapled with another amino acid residue comprising a side chain acid group to form a staple through the 6-amino group
  SITE 11: note (S)-3-amino-1-((pent-4-en-1-yloxy)carbonyl)pyrrolidine-3-ca rboxylic acid, stapled with another amino acid residue comprising an olefin group to form a staple through the olefin group
  SITE 12: note = (S)-2-amino-3-(2-(trifluoromethyl)phenyl)propanoic acid
  SITE 13: note = (S)-2-amino-3-(benzo[b]thiophen-3-yl)propanoic acid
  SITE 14: note = L-glutamic acid, stapled with another amino acid residue comprising a side chain amino group to form a staple through the 4-carboxyl group
  SITE 15: note = C-term amino
XDXXDXXAFKXXXEA

SEQ ID NO: 1619 - protein, 16 aa, synthetic construct
  SITE 1: note = N-term Acetic Acid
  SITE 1: note = (R)-2-allylpyrrolidine-2-carboxylic acid, stapled with another amino acid residue comprising an olefin group to form a staple through the olefin group
  SITE 3: note = (S)-2-amino-4,4-dimethylpentanoic acid
  VARIANT 4: note = 2-amino-2-(pent-4-en-1-yl)hept-6-enoic acid, stapled with another amino acid residue comprising an olefin group to form a staple through one of the two olefin groups and with another amino acid residue comprising an olefin group to form a staple through the other of the two olefin groups
  SITE 6: note = (S)-3-(2-amino-2-carboxyethyl)benzoic acid
  SITE 7: note = 2-amino-2-methylpropanoic acid
  SITE 10: note = L-lysine, stapled with another amino acid residue comprising a side chain acid group to form a staple through the 6-amino group
  SITE 11: note (S)-3-amino-1-((pent-4-en-1-yloxy)carbonyl)pyrrolidine-3-ca rboxylic acid, stapled with another amino acid residue comprising an olefin group to form a staple through the olefin group
  SITE 12: note = (S)-2-amino-3-(2-(trifluoromethyl)phenyl)propanoic acid
  SITE 13: note = (S)-2-amino-3-(benzo[b]thiophen-3-yl)propanoic acid
  SITE 14: note = L-glutamic acid, stapled with another amino acid residue comprising a side chain amino group to form a staple through the 4-carboxyl group
  SITE 16: note = C-term amino
XDXXDXXAFKXXXELS

SEQ ID NO: 1620 - protein, 15 aa, synthetic construct
  SITE 1: note = N-term Acetic Acid
  SITE 1: note = (R)-2-allylpyrrolidine-2-carboxylic acid, stapled with another amino acid residue comprising an olefin group to form a staple through the olefin group
  SITE 3: note = (S)-2-amino-2-cyclohexylacetic acid
  VARIANT 4: note = 2-amino-2-(pent-4-en-1-yl)hept-6-enoic acid, stapled with another amino acid residue comprising an olefin group to form a staple through one of the two olefin groups and with another amino acid residue comprising an olefin group to form a staple through the other of the two olefin groups
  SITE 6: note = (S)-3-(2-amino-2-carboxyethyl)benzoic acid
  SITE 7: note = 2-amino-2-methylpropanoic acid
  SITE 10: note = L-lysine, stapled with another amino acid residue comprising a side chain acid group to form a staple through the 6-amino group
  SITE 11: note (S)-3-amino-1-((pent-4-en-1-yloxy)carbonyl)pyrrolidine-3-ca rboxylic acid, stapled with another amino acid residue comprising an olefin group to form a staple through the olefin group
  SITE 12: note = (S)-2-amino-3-(thiophen-3-yl)propanoic acid
  SITE 13: note = (S)-2-amino-3-(benzo[b]thiophen-3-yl)propanoic acid
  SITE 14: note = L-glutamic acid, stapled with another amino acid residue comprising a side chain amino group to form a staple through the 4-carboxyl group
  SITE 15: note = C-term amino
XDXXDXXAFKXXXEA

SEQ ID NO: 1621 - protein, 15 aa, synthetic construct
  SITE 1: note = N-term Acetic Acid
  SITE 1: note = (R)-2-allylpyrrolidine-2-carboxylic acid, stapled with another amino acid residue comprising an olefin group to form a staple through the olefin group
  SITE 3: note = (S)-2-amino-4,4-dimethylpentanoic acid
  VARIANT 4: note = 2-amino-2-(pent-4-en-1-yl)hept-6-enoic acid, stapled with another amino acid residue comprising an olefin group to form a staple through one of the two olefin groups and with another amino acid residue comprising an olefin group to form a staple through the other of the two olefin groups
  SITE 6: note = (S)-3-(2-amino-2-carboxyethyl)benzoic acid
  SITE 7: note = 2-amino-2-methylpropanoic acid
  SITE 10: note = (S)-2-amino-6-(1H-1,2,3-triazol-1-yl)hexanoic acid; stapled with another amino acid residue to form a staple through the 4-position of the triazolyl group
  SITE 11: note (S)-3-amino-1-((pent-4-en-1-yloxy)carbonyl)pyrrolidine-3-ca rboxylic acid, stapled with another amino acid residue comprising an olefin group to form a staple through the olefin group
  SITE 12: note = (S)-2-amino-3-(thiophen-3-yl)propanoic acid
  SITE 13: note = (S)-2-amino-3-(benzo[b]thiophen-3-yl)propanoic acid
  SITE 14: note = O-methyl-L-serine, stapled with another amino acid residue comprising a triazolyl group to form a staple through the terminal methyl group
  SITE 15: note = C-term amino
XDXXDXXAFXXXXSA

SEQ ID NO: 1622 - protein, 15 aa, synthetic construct
  SITE 1: note = N-term Acetic Acid
  SITE 1: note = (R)-2-allylpyrrolidine-2-carboxylic acid, stapled with another amino acid residue comprising an olefin group to form a staple through the olefin group
  SITE 3: note = (S)-2-amino-4,4-dimethylpentanoic acid
  VARIANT 4: note = 2-amino-2-(pent-4-en-1-yl)hept-6-enoic acid, stapled with another amino acid residue comprising an olefin group to form a staple through one of the two olefin groups and with another amino acid residue comprising an olefin group to form a staple through the other of the two olefin groups
  SITE 6: note = (S)-3-(2-amino-2-carboxyethyl)benzoic acid
  SITE 7: note = 2-amino-2-methylpropanoic acid
  SITE 10: note = L-lysine, stapled with another amino acid residue comprising a side chain acid group to form a staple through the 6-amino group
  SITE 11: note (S)-3-amino-1-((pent-4-en-1-yloxy)carbonyl)pyrrolidine-3-ca rboxylic acid, stapled with another amino acid residue comprising an olefin group to form a staple through the olefin group
  SITE 12: note = (S)-2-amino-3-(o-tolyl)propanoic acid
  SITE 13: note = (S)-2-amino-3-(benzo[b]thiophen-3-yl)propanoic acid
  SITE 14: note = L-glutamic acid, stapled with another amino acid residue comprising a side chain amino group to form a staple through the 4-carboxyl group
  SITE 15: note = C-term amino
XDXXDXXAFKXXXEA

SEQ ID NO: 1623 - protein, 15 aa, synthetic construct
  SITE 1: note = N-term Acetic Acid
  SITE 1: note = (R)-2-allylpyrrolidine-2-carboxylic acid, stapled with another amino acid residue comprising an olefin group to form a staple through the olefin group
  SITE 3: note = (S)-2-amino-4,4-dimethylpentanoic acid
  VARIANT 4: note = 2-amino-2-(pent-4-en-1-yl)hept-6-enoic acid, stapled with another amino acid residue comprising an olefin group to form a staple through one of the two olefin groups and with another amino acid residue comprising an olefin group to form a staple through the other of the two olefin groups
  SITE 6: note = (S)-3-(2-amino-2-carboxyethyl)benzoic acid
  SITE 7: note = 2-amino-2-methylpropanoic acid
  SITE 10: note = L-lysine, stapled with another amino acid residue comprising a side chain acid group to form a staple through the 6-amino group
  SITE 11: note (S)-3-amino-1-((pent-4-en-1-yloxy)carbonyl)pyrrolidine-3-ca rboxylic acid, stapled with another amino acid residue comprising an olefin group to form a staple through the olefin group
  SITE 12: note = (S)-2-amino-3-(2-bromophenyl)propanoic acid
  SITE 13: note = (S)-2-amino-3-(benzo[b]thiophen-3-yl)propanoic acid
  SITE 14: note = L-glutamic acid, stapled with another amino acid residue comprising a side chain amino group to form a staple through the 4-carboxyl group
  SITE 15: note = C-term amino
XDXXDXXAFKXXXEA

SEQ ID NO: 1624 - protein, 15 aa, synthetic construct
  SITE 1: note = N-term Acetic Acid
  SITE 1: note = (R)-2-allylpyrrolidine-2-carboxylic acid, stapled with another amino acid residue comprising an olefin group to form a staple through the olefin group
  SITE 3: note = (S)-2-amino-4,4-dimethylpentanoic acid
  VARIANT 4: note = 2-amino-2-(pent-4-en-1-yl)hept-6-enoic acid, stapled with another amino acid residue comprising an olefin group to form a staple through one of the two olefin groups and with another amino acid residue comprising an olefin group to form a staple through the other of the two olefin groups
  SITE 6: note = (S)-3-(2-amino-2-carboxyethyl)benzoic acid
  SITE 7: note = 2-amino-2-methylpropanoic acid
  SITE 10: note = (S)-2-amino-6-(1H-1,2,3-triazol-1-yl)hexanoic acid; stapled with another amino acid residue to form a staple through the 4-position of the triazolyl group
  SITE 11: note (S)-3-amino-1-((pent-4-en-1-yloxy)carbonyl)pyrrolidine-3-ca rboxylic acid, stapled with another amino acid residue comprising an olefin group to form a staple through the olefin group
  SITE 12: note = (S)-2-amino-3-(thiophen-3-yl)propanoic acid
  SITE 13: note = (S)-2-amino-3-(benzo[b]thiophen-3-yl)propanoic acid
  SITE 14: note = L-alanine; stapled with another amino acid residue comprising a triazolyl group to form a staple through the terminal methyl group
  SITE 15: note = C-term amino
XDXXDXXAFXXXXAA

SEQ ID NO: 1625 - protein, 15 aa, synthetic construct
  SITE 1: note = N-term Acetic Acid
  SITE 1: note = (R)-2-allylpyrrolidine-2-carboxylic acid, stapled with another amino acid residue comprising an olefin group to form a staple through the olefin group
  SITE 3: note = (S)-2-amino-4,4-dimethylpentanoic acid
  VARIANT 4: note = 2-amino-2-(pent-4-en-1-yl)hept-6-enoic acid, stapled with another amino acid residue comprising an olefin group to form a staple through one of the two olefin groups and with another amino acid residue comprising an olefin group to form a staple through the other of the two olefin groups
  SITE 6: note = (S)-3-(2-amino-2-carboxyethyl)benzoic acid
  SITE 7: note = 2-amino-2-methylpropanoic acid
  SITE 9: note = (S)-2-amino-3-(thiophen-3-yl)propanoic acid
  SITE 10: note = L-lysine, stapled with another amino acid residue comprising a side chain acid group to form a staple through the 6-amino group
  SITE 11: note (S)-3-amino-1-((pent-4-en-1-yloxy)carbonyl)pyrrolidine-3-ca rboxylic acid, stapled with another amino acid residue comprising an olefin group to form a staple through the olefin group
  SITE 12: note = (S)-2-amino-3-(thiophen-3-yl)propanoic acid
  SITE 13: note = (S)-2-amino-3-(benzo[b]thiophen-3-yl)propanoic acid
  SITE 14: note = L-glutamic acid, stapled with another amino acid residue comprising a side chain amino group to form a staple through the 4-carboxyl group
  SITE 15: note = C-term amino
XDXXDXXAXKXXXEA

SEQ ID NO: 1626 - protein, 15 aa, synthetic construct
  SITE 1: note = N-term Acetic Acid
  SITE 1: note = (R)-2-allylpyrrolidine-2-carboxylic acid, stapled with another amino acid residue comprising an olefin group to form a staple through the olefin group
  SITE 3: note = (S)-2-amino-4,4-dimethylpentanoic acid
  VARIANT 4: note = 2-amino-2-(pent-4-en-1-yl)hept-6-enoic acid, stapled with another amino acid residue comprising an olefin group to form a staple through one of the two olefin groups and with another amino acid residue comprising an olefin group to form a staple through the other of the two olefin groups
  SITE 6: note = (S)-3-(2-amino-2-carboxyethyl)benzoic acid
  SITE 7: note = 2-amino-2-methylpropanoic acid
  SITE 10: note = Cysteine, sulfur bonded to the methyl at position 1 of 1,3-dimethylbenzene, stapled with another thiol through the methyl at position 3 of 1,3-dimethylbenzene
  SITE 11: note (S)-3-amino-1-((pent-4-en-1-yloxy)carbonyl)pyrrolidine-3-ca rboxylic acid, stapled with another amino acid residue comprising an olefin group to form a staple through the olefin group
  SITE 12: note = (S)-2-amino-3-(2-(trifluoromethyl)phenyl)propanoic acid
  SITE 13: note = (S)-2-amino-3-(benzo[b]thiophen-3-yl)propanoic acid
  SITE 15: note = C-term amino
XDXXDXXAFCXXXCA

SEQ ID NO: 1627 - protein, 15 aa, synthetic construct
  SITE 1: note = N-term Acetic Acid
  SITE 1: note = (R)-2-allylpyrrolidine-2-carboxylic acid, stapled with another amino acid residue comprising an olefin group to form a staple through the olefin group
  SITE 3: note = (S)-2-amino-4,4-dimethylpentanoic acid
  VARIANT 4: note = 2-amino-2-(pent-4-en-1-yl)hept-6-enoic acid, stapled with another amino acid residue comprising an olefin group to form a staple through one of the two olefin groups and with another amino acid residue comprising an olefin group to form a staple through the other of the two olefin groups
  SITE 6: note = (S)-3-(2-amino-2-carboxyethyl)benzoic acid
  SITE 7: note = 1-aminocyclopentane-1-carboxylic acid
  SITE 10: note = L-lysine, stapled with another amino acid residue comprising a side chain acid group to form a staple through the 6-amino group
  SITE 11: note (S)-3-amino-1-((pent-4-en-1-yloxy)carbonyl)pyrrolidine-3-ca rboxylic acid, stapled with another amino acid residue comprising an olefin group to form a staple through the olefin group
  SITE 12: note = (S)-2-amino-3-(thiophen-3-yl)propanoic acid
  SITE 13: note = (S)-2-amino-3-(benzo[b]thiophen-3-yl)propanoic acid
  SITE 14: note = L-glutamic acid, stapled with another amino acid residue comprising a side chain amino group to form a staple through the 4-carboxyl group
  SITE 15: note = C-term amino
XDXXDXXAFKXXXEA

1. A method for treating hepatocellular cancer in a subject, wherein the subject comprises hepatocellular cancer cells that comprise a D32H or D32V mutation in beta-catenin, comprising administering or delivering to the subject an effective amount of an agent having the structure of:
or a salt thereof.

2. A method for treating hepatocellular cancer in a subject, wherein the subject comprises hepatocellular cancer cells that comprise a S37C mutation in beta-catenin, comprising administering or delivering to the subject an effective amount of an agent described in claim 1.

3. A method for treating hepatocellular cancer in a subject, wherein the subject comprises hepatocellular cancer cells that comprise a S45F mutation in beta-catenin, comprising administering or delivering to the subject an effective amount of an agent described in claim 1.

4. A composition, characterized in that when the composition is administered to a hepatocellular tumor comprising a D32H, D32V, S37C or S45F mutation in beta-catenin, growth of the tumor is reduced, and wherein the composition comprises an agent having the structure of:
or a salt thereof.

5. A method for treating hepatocellular cancer in a subject, comprising administering or delivering to the subject an effective amount of:
an agent having the structure of:
or a salt thereof, wherein:
R_{N} is a peptide, an amino protecting group or R′-L^{RN}-;
each of L^{P1}, L^{P2}, L^{P3}, L^{P4}, L^{P5}, L^{P6}, and L^{P7} is independently L, wherein L^{P1}, L^{P2}, L^{P3}, L^{P4}, L^{P5}, L^{P6}, and L^{P7} comprise:
a first R′ group and a second R′ group which are taken together to form -L^{s}- which is bonded to the atom to which a first R′ group is attached and the atom to which a second R′ group is attached; and
a third R′ group and a fourth R′ group which are taken together to form -L^{s}- which is bonded to the atom to which a third R′ group is attached and the atom to which a fourth R′ group is attached;
each L^{s} is independently -L^{s1}-L^{s2}-L^{s3}-, wherein each L^{s1}, L^{s2} and L^{s3} is independently L;
L^{AA1} is an amino acid residue that comprises a side chain comprising an acidic or polar group;
L^{AA2} is an amino acid residue that comprises a side chain comprising an acidic or polar group;
L^{AA3} is an amino acid residue;
L^{AA4} is an amino acid residue that comprises a side chain comprising an optionally substituted aromatic group;
L^{AA5} is an amino acid residue that comprises a side chain comprising an optionally substituted aromatic group;
L^{AA6} is an amino acid residue that comprises a side chain comprising an optionally substituted aromatic group;
R^{C} is a peptide, a carboxyl protecting group, -L^{RC}-R′, —O-L^{RC}-R′ or —N(R′)-L^{RC}-R′;
each of L^{RN} and L^{RC} is independently L;
each L is independently a covalent bond, or an optionally substituted, bivalent C₁-C₂₅ aliphatic or heteroaliphatic group having 1-10 heteroatoms, wherein one or more methylene units of the group are optionally and independently replaced with —C(R′)₂—, -Cy-, —O—, —S—, —S—S—, —N(R′)—, —C(O)—, —C(S)—, —C(NR′)—, —C(O)N(R′)—, —N(R′)C(O)N(R′)—, —N(R′)C(O)O—, —S(O)—, —S(O)₂—, —S(O)₂N(R′)—, —C(O)S—, or —C(O)O—;
each -Cy- is independently an optionally substituted bivalent, 3-30 membered, monocyclic, bicyclic or polycyclic ring having 0-10 heteroatoms;
each R′ is independently -L-R, —C(O)R, —CO₂R, or —SO₂R;
each R is independently —H, or an optionally substituted group selected from C₁₋₃₀ aliphatic, C₁₋₃₀ heteroaliphatic having 1-10 heteroatoms, C₆₋₃₀ aryl, C₆₋₃₀ arylaliphatic, C₆₋₃₀ arylheteroaliphatic having 1-10 heteroatoms, 5-30 membered heteroaryl having 1-10 heteroatoms, and 3-30 membered heterocyclyl having 1-10 heteroatoms, or
two R groups are optionally and independently taken together to form a covalent bond, or:
two or more R groups on the same atom are optionally and independently taken together with the atom to form an optionally substituted, 3-30 membered, monocyclic, bicyclic or polycyclic ring having, in addition to the atom, 0-10 heteroatoms; or
two or more R groups on two or more atoms are optionally and independently taken together with their intervening atom(s) to form an optionally substituted, 3-30 membered, monocyclic, bicyclic or polycyclic ring having, in addition to the intervening atom(s), 0-10 heteroatoms; or
an agent having the structure of formula I:
or a salt thereof, wherein:
R^{N} is a peptide, an amino protecting group or R′-L^{RN}-;
each of L^{P1}, L^{P2}, L^{P3}, L^{P4}, L^{P5}, L^{P6}, and L^{P7} is independently L, wherein L^{P1}, L^{P2}, L^{P3}, L^{P4}, L^{P5}, L^{P6}, and L^{P7} comprise:
a first R′ group and a second R′ group which are taken together to form -L^{s}- which is bonded to the atom to which a first R′ group is attached and the atom to which a second R′ group is attached; and
a third R′ group and a fourth R′ group which are taken together to form -L^{s}- which is bonded to the atom to which a third R′ group is attached and the atom to which a fourth R′ group is attached;
each L^{s} is independently -L^{s1}-L^{s2}-L83-, wherein each L^{s1}, L^{s2} and L^{s3} is independently L;
L^{AA1} is L^{AR}, wherein a methylene unit is replaced with —C(R′)(R^{AS})—, wherein R^{AS} is -L^{AS1}-R^{AA1}, wherein R^{AA1} is —CO₂R or —SO₂R;
L^{AA2} is L^{AR}, wherein a methylene unit is replaced with —C(R′)(R^{AS})—, wherein R^{AS} is -L^{AS2}-R^{AA2}, wherein R^{AA2} is —CO₂R, or —SO₂R;
L^{AA3} is L^{AR}, wherein a methylene unit is replaced with —C(R′)(R^{AS})—, wherein R^{AS} is -L^{AS3}-R^{AA3}, wherein R^{AA3} is R′;
L^{AA4} is L^{AR}, wherein a methylene unit is replaced with —C(R′)(R^{AS})—, wherein R^{AS} is -L^{AS4}-R^{AA4}, wherein R^{AA4} is an optionally substituted group selected from 6-14 membered aryl or 5-14 membered heteroaryl having 1-6 heteroatoms;
L^{AA5} is L^{AR}, wherein a methylene unit is replaced with —C(R′)(R^{AS})—, wherein R^{AS} is -L^{AS5}-R^{AA5}, wherein R^{AA5} is an optionally substituted group selected from 6-14 membered aryl or 5-14 membered heteroaryl having 1-6 heteroatoms;
L^{AA6} is L^{AR}, wherein a methylene unit is replaced with —C(R′)(R^{AS})—, wherein R^{AS} is -L^{AS6}-R^{AA6}, wherein R^{AA6} is an optionally substituted group selected from 6-14 membered aryl or 5-14 membered heteroaryl having 1-6 heteroatoms;
R^{C} is a peptide, a carboxyl protecting group, -L^{RC}-R′, —O-L^{RC}-R′ or —N(R′)-L^{RC}-R′;
each of L^{RN} and L^{RC} is independently L;
each L^{AR} is independently an optionally substituted, bivalent C₁-C₆ aliphatic group, wherein one or more methylene units of the group are optionally and independently replaced with —C(R′)₂—, —C(R′)(R^{AS})—, -Cy-, —O—, —S—, —S—S—, —N(R′)—, —C(O)—, —C(S)—, —C(NR′)—, —C(O)N(R′)—, —N(R′)C(O)N(R′)—, —N(R′)C(O)O—, —S(O)—, —S(O)₂—, —S(O)₂N(R′)—, —C(O)S—, or —C(O)O—;
each of L^{AS1}, L^{AS2}, L^{AS3}, L^{AS4}, L^{AS5}, and L^{AS6} is independently L^{AS};
each R^{AS} is independently -L^{AS}-R′;
each L^{AS} is independently a covalent bond or an optionally substituted, bivalent C₁-C₁₀ aliphatic or heteroaliphatic group having 1-5 heteroatoms, wherein one or more methylene units of the group are optionally and independently replaced with —C(R′)₂—, -Cy-, —O—, —S—, —S—S—, —N(R′)—, —C(O)—, —C(S)—, —C(NR′)—, —C(O)N(R′)—, —N(R′)C(O)N(R′)—, —N(R′)C(O)O—, —S(O)—, —S(O)₂—, —S(O)₂N(R′)—, —C(O)S—, or —C(O)O—;
each L is independently a covalent bond, or an optionally substituted, bivalent C₁-C₂₅ aliphatic or heteroaliphatic group having 1-10 heteroatoms, wherein one or more methylene units of the group are optionally and independently replaced with —C(R′)₂—, -Cy-, —O—, —S—, —S—S—, —N(R′)—, —C(O)—, —C(S)—, —C(NR′)—, —C(O)N(R′)—, —N(R′)C(O)N(R′)—, —N(R′)C(O)O—, —S(O)—, —S(O)₂—, —S(O)₂N(R′)—, —C(O)S—, or —C(0) 0-;
each -Cy- is independently an optionally substituted bivalent, 3-30 membered, monocyclic, bicyclic or polycyclic ring having 0-10 heteroatoms;
each R′ is independently -L-R, —C(O)R, —CO₂R, or —SO₂R;
each R is independently —H, or an optionally substituted group selected from C₁₋₃₀ aliphatic, C₁₋₃₀ heteroaliphatic having 1-10 heteroatoms, C₆₋₃₀ aryl, C₆₋₃₀ arylaliphatic, C₆₋₃₀ arylheteroaliphatic having 1-10 heteroatoms, 5-30 membered heteroaryl having 1-10 heteroatoms, and 3-30 membered heterocyclyl having 1-10 heteroatoms, or
two R groups are optionally and independently taken together to form a covalent bond, or:
two or more R groups on the same atom are optionally and independently taken together with the atom to form an optionally substituted, 3-30 membered, monocyclic, bicyclic or polycyclic ring having, in addition to the atom, 0-10 heteroatoms; or
two or more R groups on two or more atoms are optionally and independently taken together with their intervening atom(s) to form an optionally substituted, 3-30 membered, monocyclic, bicyclic or polycyclic ring having, in addition to the intervening atom(s), 0-10 heteroatoms.

6. A method for treating hepatocellular cancer in a subject, comprising administering or delivering to the subject an effective amount of an agent having the structure of:
[X]ₚX¹X²X³X⁴X⁵X⁶X⁷X⁸X⁹X¹⁰X¹¹X¹²X¹³X¹⁴[X¹⁵]ₚ₁₅[X¹⁶]ₚ₁₆[X¹⁷]ₚ₁₇[X]p′,
wherein:
each of p15, p16 and p17 is independently 0 or 1;
each of p and p′ is independently 0-10; and
each of X, X¹, X², X³, X⁴, X⁵, X⁶, X⁷, X⁸, X⁹, X¹⁰, X¹¹, X¹², X¹³, X¹⁴, X¹⁵, X¹⁶, and X¹⁷ is independently an amino acid residue.

7. The method of any one of claims 5-6, wherein the subject comprises hepatocellular cancer cells that comprise a mutation in beta-catenin.

8. The method of any one of claims 5-6, wherein the subject comprises hepatocellular cancer cells that comprise a D32H mutation in beta-catenin.

9. The method of any one of claims 5-6, wherein the subject comprises hepatocellular cancer cells that comprise a D32V mutation in beta-catenin.

10. The method of any one of claims 5-6, wherein the subject comprises hepatocellular cancer cells that comprise a S37C mutation in beta-catenin.

11. The method of any one of claims 5-6, wherein the subject comprises hepatocellular cancer cells that comprise a S45F mutation in beta-catenin.

12. A composition, characterized in that when the composition is administered to a hepatocellular tumor, growth of the tumor is reduced, and wherein the composition comprises an agent of claim 5.

13. A composition, characterized in that when the composition is administered to a hepatocellular tumor, growth of the tumor is reduced, and wherein the composition comprises an agent having the structure of:
wherein:
each of p15, p16 and p17 is independently 0 or 1;
each of p and p′ is independently 0-10; and
each of X, X¹, X², X³, X⁴, X⁵, X⁶, X⁷, X⁸, X⁹, X¹⁰, X¹¹, X¹², X¹³, X¹⁴, X¹⁵, X¹⁶, and X¹⁷ is independently an amino acid residue.

14. The composition of any one of claims 12-13, wherein the tumor comprises hepatocellular cells comprising a mutation in beta-catenin.

15. The composition of claim 14, wherein the mutation is D32H.

16. The composition of claim 14, wherein the mutation is D32V.

17. The composition of claim 14, wherein the mutation is S37C.

18. The composition of claim 14, wherein the mutation is S45F.

19. The method or composition of any one of claims 6-18, wherein the agent is or comprises a peptide comprising:
wherein:
each of p0, p15, p16 and p17 is independently 0 or 1;
each of X⁰, X¹, X², X³, X⁴, X³, X⁶, X⁷, X⁸, X″, X¹⁰, X¹¹, X¹², X¹³, X¹⁴, X¹⁵, X¹⁶, and X¹⁷ is independently an amino acid residue, wherein:
X² comprises a side chain comprising an acidic or a polar group;
X⁵ comprises a side chain comprising an acidic or a polar group; and
each of X⁹, X¹² and X¹³ comprises a side chain comprising an optionally substituted aromatic group.

20. The method or composition of any one of claims 6-14, the agent comprises three or more staples within 10-20 amino acid residues.

21. The method or composition of any one of claims 6-20, wherein five of X⁰, X¹, X³, X⁴, X⁷, X¹⁰, X¹¹ and X¹⁴ are each independently an amino acid residue suitable for stapling, or are each independently stapled.

22. The method or composition of any one of claims 6-21, wherein X¹ and X⁴ are connected by a staple.

23. The method or composition of any one of claims 6-22, wherein X⁴ and X¹¹ are connected by a staple.

24. The method or composition of any one of claims 6-23, wherein X¹⁰ and X¹⁴ are connected by a staple.

25. The method or composition of any one of the preceding claims, wherein the agent comprises three or more staples.

26. The method or composition of any one of the preceding claims, wherein the agent comprises a N-terminal group.

27. The method or composition of any one of claims 6-26, wherein X¹ is PL3.

28. The method or composition of any one of claims 6-27, wherein X⁴ is a residue of an amino acid that comprises an olefin.

29. The method or composition of any one of claims 6-28, wherein X⁴ is B5.

30. The method or composition of any one of claims 6-29, wherein X¹⁰ is a residue of an amino acid that comprises an optionally substituted carboxyl group, an optionally substituted amino group, an azidyl group, an optionally substituted alkynyl group, or an optionally substituted thiol group.

31. The method or composition of any one of claims 6-30, wherein X¹⁰ is Lys.

32. The method or composition of any one of claims 6-31, wherein X¹¹ is a residue of an amino acid that comprises an olefin.

33. The method or composition of any one of claims 6-32, wherein X¹¹ is PyrS2.

34. The method or composition of any one of claims 6-33, wherein X¹⁴ is a residue of an amino acid that comprises a carboxyl group, an amino group, an azidyl group, an alkynyl group, or a thiol group.

35. The method or composition of any one of claims 6-34, wherein X¹⁴ is Glu.

36. The method or composition of any one of claims 6-35, wherein X¹⁰ and X¹⁴ are connected by a staple, wherein the staple comprises —C(O)N(R′)—.

37. The method or composition of any one of claims 6-36, wherein X² comprises a side chain comprising an acidic group.

38. The method or composition of any one of claims 6-37, wherein X² is Asp, Ala, Asn, Glu, Npg, Ser, Hse, Val, S5, S6, AcLys, TfeGA, aThr, Aad, Pro, Thr, Phe, Leu, PL3, Gln, isoGlu, MeAsn, isoDAsp, RbGlu, SbGlu, AspSH, Ile, SbMeAsp, RbMeAsp, aMeDAsp, OAsp, 3COOHF, NAsp, 3Thi, NGlu, isoDGlu, BztA, Tle, Aib, MePro, Chg, Cha, or DipA.

39. The method or composition of any one of claims 6-38, wherein X³ comprises one or two hydrophobic side chains.

40. The method or composition of any one of claims 6-39, wherein X³ is Npg, Ile, Asp, Cha, DipA, Chg, Leu, B5, Cba, S5, Ala, Glu, AllylGly, nLeu, Ser, B6, Asn, B4, GlnR, Val, [Phc][Allyl]Dap, Hse, [Bn][Allyl]Dap, 1MeK, R5, Phe, CypA, CyLeu, Pff, DiethA, Tyr, Trp, Aib, Phg, OctG, MorphNva, F2PipNva, [Piv][Allyl]Dap, [CyCO][Allyl]Dap, Lys, or S3.

41. The method or composition of any one of claims 6-40, wherein X⁵ comprises a side chain comprising an acidic group.

42. The method or composition of any one of claims 6-41, wherein X⁵ is selected from Asp, 3COOHF, TfeGA, Gln, [CH2CMe2CO2H]TriAzDap, Thr, Glu, 2OH3COOHF, 4OH3COOHF, 4COOHF, 2COOHF, His, Tyr, 5F3Me2COOHF, 4F3Me2COOHF, 5F3Me3COOHF, 4F3Me3COOHF, 3F2COOHF, Val, Ser, Trp, Asn, Ala, Arg, dGlu, aThr, hTyr, 3cbmf, Leu, Phe, Lys, and Ile.

43. The method or composition of any one of claims 6-42, wherein X⁶ comprises a side chain comprising an acidic group.

44. The method or composition of any one of claims 6-43, wherein X⁶ is 3COOHF, TfeGA, or Asp.

45. The method or composition of any one of claims 6-44, wherein X⁷ is a hydrophobic amino acid residue.

46. The method or composition of any one of claims 6-45, wherein X⁷ is selected from Aib, Ala, MorphGln, Gln, Ser, iPrLys, nLeu, Cha, Hse, Npg, Val, CyLeu, Thr, Phe, Acp, Asn, DaMeS, aMeDF, Leu, Cpg, Cbg, Me2Gln, Met20, AcLys, His, aMeL, DaMeL, aMeV, aMeS, and aMeF.

47. The method or composition of any one of claims 6-46, wherein X⁸ is a hydrophobic amino acid residue.

48. The method or composition of any one of claims 6-47, wherein X⁸ is selected from Ala, Aib, Cpg, Val, Leu, Gln, Lys, Asp, Glu, Aad, nLeu, Cba, Ser, Thr, aThr, MorphGln, Phe, hPhe, hTyr, and AcLys.

49. The method or composition of any one of claims 6-48, wherein X⁹ comprises a side chain which is or comprises an optionally substituted aromatic group.

50. The method or composition of any one of claims 6-49, wherein X⁹ is AA9, Phe, Ala, Lys, 3COOHF, Aib, 2NapA, nLeu, 2Thi, Tyr, 3Thi, 4FF, 4CIF, 4BrF, 3FF, 3CIF, 3BrF, 2FF, 30MeF, 4CNF, 3CNF, 4MeF, 3MeF, Aic, RbiPrF, SbiPrF, RbiPrDF, RbMeXylA, RbMeXyIDA, Cba, CypA, BztA, 1NapA, Trp, Leu, Ile, Ser, Chg, Hse, 4TriA, 3F3MeF, Thr, His, Val, Asn, Gln, 2Cpg, SbMeXylA, or SbMeXyIDA.

51. The method or composition of any one of claims 6-50, wherein X¹² comprises a side chain which is or comprises an optionally substituted aromatic group.

52. The method or composition of any one of claims 6-51, wherein X¹² is 3Thi, Phe, 2F3MeF, PyrS2, 2CIF, hnLeu, BztA, 2Thi, 2MeF, 2FF, 34CIF, Lys, nLeu, 2COOHF, 2PhF, hCbA, hCypA, hCha, CypA, hPhe, DipA, HepG, Dap7Abu, hhLeu, hhSer, HexG, [2IAPAc]2NH2F, Ala, Abu, Leu, hLeu, Npg, Cpa, PyrS1, [Bnc]2NH₂F, [Phc]2NH2F, [BiPh]2NH2F, [3PyAc]2NH2F, Nva, Cha, ChA, 2FurA, 2OMeF, 2BrF, 2CNF, 2NO2F, 2PyrA, 3PyrA, 4PyrA, His, 1NapA, Val, Ile, Chg, DiethA, OctG, 2cbmF, c6Phe, [McPipAc]2NH2F, or [2PyCypCO]2NH2F.

53. The method or composition of any one of claims 6-52, wherein the side chain of X¹³ comprises an optionally substituted aromatic group.

54. The method or composition of any one of claims 6-53, wherein X¹³ is selected from BztA, 34CIF, 2NapA, 3BrF, 34MeF, 3Thi, Phe, GlnR, 34MeF, 2NapA and Lys.

55. The method or composition of any one of claims 6-54, wherein p15 is 1.

56. The method or composition of any one of claims 6-55, wherein X¹⁵ comprises a hydrophobic side chain.

57. The method or composition of any one of claims 5-19, wherein the agent is an agent selected from Table E2 or Table E3, or the composition is a composition selected from Table E2 or Table E3.

58. The method or composition of any one of claims 6-56, wherein the peptide forms a structure that comprises a helix.

59. The method or composition of any one of claims 6-58, wherein a double bond of a (i, i+7) staple is E.

60. The method or composition of any one of claims 6-59, wherein a double bond of a (i, i+7) staple is Z.

61. The method or composition of any one of claims 6-60, wherein a double bond of a (i, i+2), (i, i+3) or (i, i+4) staple is E.

62. The method or composition of any one of claims 6-61, wherein a double bond of a (i, i+2), (i, i+3) or (i, i+4) staple is Z.

63. The method or composition of any one of claims 6-62, wherein a carbon atom bonded to two staples (e.g., in B5) is of R configuration.

64. The method or composition of any one of claims 6-62, wherein a carbon atom bonded to two staples (e.g., in B5) is of S configuration.

65. The method or composition of any one of claims 1-18, wherein the agent has the structure of SP-1-1, SP-1-2, SP-1-3, SP-1-4, SP-1-5, SP-1-6, SP-1-7, SP-1-8, SP-2-1, SP-2-2, SP-2-3, SP-2-4, SP-2-5, SP-2-6, SP-2-7, SP-2-8, SP-3-1, SP-3-2, SP-4-1, SP-4-2, SP-4-3, SP-4-4, SP-4-5, SP-4-6, SP-4-7, SP-4-8, SP-5-1, SP-5-2, SP-5-3, SP-5-4, SP-5-5, SP-5-6, SP-5-7, SP-5-8, SP-6, SP-7-1, SP-7-2, SP-7-3, SP-7-4, SP-7-5, SP-7-6, SP-7-7, SP-7-8, SP-8-1, SP-8-2, SP-8-3, SP-8-4, SP-8-5, SP-8-6, SP-8-7, SP-8-8, SP-9-1, SP-9-2, SP-9-3, SP-9-4, SP-9-5, SP-9-6, SP-9-7, SP-9-8, SP-10-1, SP-10-2, SP-10-3, SP-10-4, SP-10-5, SP-10-6, SP-10-7, SP-10-8, SP-11-1, SP-11-2, SP-11-3, SP-11-4, SP-11-5, SP-11-6, SP-11-7, SP-11-8, SP-12-1, SP-12-2, SP-12-3, SP-12-4, SP-12-5, SP-12-6, SP-12-7, SP-12-8, SP-13-1, SP-13-2, SP-13-3, SP-13-4, SP-13-5, SP- 13-6, SP-13-7, SP-13-8, SP-14-1, SP-14-2, SP-14-3, SP-14-4, SP-14-5, SP-14-6, SP-14-7, SP-14-8, SP-15-1, SP-15-2, SP-15-3, SP-15-4, SP-15-5, SP-15-6, SP-15-7, SP-15-8, or a salt thereof.

66. The method or composition of any one of claims 1-18, wherein the agent has the structure of
or a salt thereof.

67. The method or composition of claim 66, wherein the agent has the same retention time under a HPLC condition as I-66 prepared as described in Example 3, wherein the HPLC condition can separate I-66 and I-67 prepared as described in Example 3.

68. The method or composition of claim 66, wherein the agent shows a retention time of about 15.3 min under the following HPLC condition: Agilent Poroshell 120 EC-C18; 4.6×100 mm; solvent A=0.1% TFA in water; solvent B=0.075% TFA in acetonitrile; gradient is 10% B to 95% B over 30 min; detection is UV absorbance at 220 nM.

69. The method or composition of claim 48, wherein chemical shifts of 1H bonded to carbon of the agent are (methanol-d4, about 298K, about 900 MHz): 3.96, 6.34, 6.84, 6.36, 4.38, 4.31, 3.82, 4.21, 7.21, 7.24, 7.07, 7.24, 7.21, 4.03, 4.25, 7.97, 7.94, 7.42, 7.50, 4.40, 5.29, 5.31, 4.27, 4.31, 5.56, 5.36, 7.89, 7.38, 7.41, 7.89, 7.00, 4.30, 2.00, 2.10, 1.60, 1.65, 3.73, 4.15, 3.15, 4.22, 2.29, 2.41, 3.53, 3.25, 3.06, 2.95, 1.93, 2.38, 2.92, 3.45, 1.18, 1.36, 1.55, 1.84, 1.53, 3.27, 3.31, 3.27, 3.44, 2.74, 2.96, 1.92, 2.07, 1.37, 2.38, 1.80, 1.88, 2.71, 2.81, 3.20, 2.05, 1.97, 2.17, 0.84, 1.42, 1.57, 2.69, 3.76, 3.92, 2.20, 2.42, 2.22, 3.08, 3.40, 1.55, 1.07, 1.42, 1.59, 1.33, and 2.23.

70. The method or composition of claim 48, wherein chemical shifts of ¹³C of the agent are (methanol-d4, about 298K, about 226 MHz, chemical shift): 65.89, 137.36, 138.13, 57.28, 138.06, 132.12, 169.51, 62.78, 31.36, 70.51, 132.57, 139.58, 141.98, 156.51, 173.13, 175.55, 175.8, 174.47, 175.8, 177.56, 178.58, 174.39, 175.7, 177.0, 175.8, 175.44, 175.6, 176.97, 175.55, 178.08, 172.38, 59.94, 123.42, 125.19, 129.15, 56.93, 55.69, 57.70, 60.70, 130.39, 129.83, 128.08, 129.83, 130.39, 54.54, 60.94, 131.96, 129.37, 129.54, 135.08, 55.56, 131.26, 131.47, 56.48, 55.33, 129.2, 126.96, 122.71, 125.37, 125.20, 123.87, 126.99, 51.20, 29.99, 30.63, 67.18, 53.94, 31.81, 45.37, 32.60, 27.47, 33.84, 39.25, 23.2, 35.8, 29.61, 38.18, 38.10, 36.18, 30.00, 23.32, 33.8, 45.96, 35.69, 33.09, 27.46, 23.29, 35.96, 49.50, 24.46, 36.46, 31.76, 17.00, 30.18, 17.76, 28.98, 23.20, 23.87, 172.48, and 174.10.

71. The method or composition of any one of the preceding claims, wherein the agent has a diastercopurity of about 80%, 85%, 90%, 91%, 92%, 93%, 94%, 95%, 96%, 97%, 98%, 99% or more, or having a purity of about 80%, 85%, 90%, 91%, 92%, 93%, 94%, 95%, 96%, 97%, 98%, 99% or more.

72. The compositions of any one of claims 4 and 13-71, wherein growth of the tumor is reduced compared to a reference.

73. The composition of claim 72, wherein the reference is absence of administration of the agent.

74. The composition of claim 72, wherein the reference is administration of a reference agent.

75. The composition of claim 72, wherein the reference is administration of I-470.

76. The composition of any one of claims 4 and 13-75, wherein growth of the tumor is reduced in a mouse PDX model.

77. The composition of claim 76, wherein one or each dose administered to a mouse is independently about 20-80 mg/kg.

78. The composition of claim 76, wherein one or each dose administered to a mouse is independently about 60 mg/kg.

79. The composition of any one of claims 4 and 13-78, wherein growth of the tumor is reduced after about 1, 2, 3, 4, 5, 6, 7, 8, 9, or 10 doses.

80. A pharmaceutical composition, comprising or delivering an agent described in any one of the preceding claims, and a pharmaceutically acceptable carrier.

81. The method or composition of any one of the preceding claims, wherein the agent comprises one or more staples each independently comprises one or more olefin double bond, wherein the ratio of the two stereoisomers of an olefin double bond in a staple is about 2:1, 3:1, 4:1, 5:1, 6:1, 7:1, 8:1, 9:1, 10:1, 15:1, 20:1, 30:1, 40:1, 50:1 or more.

82. A method for inhibiting hepatocellular cancer cell proliferation, comprising administering or delivering to the hepatocellular cancer cell an effective amount of an agent or composition described in any one of the proceeding claims.

83. The method of any one of the any one of the preceding claims, comprising administering or deliver to a subject a second therapeutic agent or therapy.

84. The method of claim 83, wherein a second therapeutic agent is or comprises a chemotherapy agent, a hormone therapy agent, an immunotherapy agent, a checkpoint inhibitor, an antibody, a CTLA-4, PD-1 or PD-L1 inhibitor, or a cell, or a second therapy is or comprises surgery, chemotherapy, radiotherapy, hormone therapy, stem cell or bone marrow transplant, immunotherapy, T-cell therapy, or CAR T-cell therapy.

85. The method of any one of the preceding claims, comprising assessing expression of a nucleic acid.

86. An agent, compound, method, or composition of any one of Embodiments 1-520.
